United States Patent Application Publication US 2019/0093148 A1 - sequence listing, part 2

SEQ ID NO: 1 - DNA, 5241455 bp, Serratia marcescens WW4 (residues 1,747,153-3,494,304 of 5,241,455)
tgttgcatcacgatctaatccctttggtacaagcggatgtttacctgcaagatgacgtttataaagattattatttaaagaaaatcaattggttgaagaacgcggatctgctgctgaccaactcggactatacttcttcggaggtgattgagtggttggatattcccgaaagcaaagtgtgcacgatttcggcggcgaccgaagaacattttgatatcagcgagatttccgctaataatttttctgaattaaaagagaaatatggcattacccgtgatgtcgtactttatgctcctggcggttttgactcccgtaaaaacttcaagaggttgattgaggcttacagcaaattaacgcctgaattgcgtgaaaaaaatcaactggttatcgttagtaagctatcggacagcgatcgcagttatctgcattccatcgcgcgtaatcaacaactgcgtgatgacgagatggttctgactggatatgtatcggaacaggatctggtcgtgttttatcagttggccaagttgtttgtctttgcttcgttgcatgaaggctttggattaccgattctggaggccatgacgtgcggtgcggcgacaatcggttctaacgtcaccagtatcccggaagtgatcggttatgccgatgcgctgtttgatccctattctgttgagtcaataagcgacaagcttcaacaggctttaagcgatgacgttttcctcgctcaattaaagaaacacgctttggagcaatccgccaagttttcgtgggataaggcgggaactatcgccttgtctcgttttgagcggttagttgctgaggccggagatgtggagtttgaatcggtaacgtcatcgcaattgatctccgccgtttcctcgatcaaatgtcgtgaagagccttcggataacgatctgcggtcaaccgctgaggcgatggatagaaatgccaaaagactcgagttgcaaggcattgcgctagagtctctctcttggcgcgttgaaggaccttttgacagctcctatagcctggctttggtaaatcgagaattcgcgcgagcactcagtcgcgacaatgttgacgttctgctgcattcaacggaagggcctggcgactttgctccaaatgaaaccttcctaagtgatgaaagtaatgcggatttgaaggcattccattcgcgtttgcagcagcggagtgagcagcaggttaatgtattgagccgcaatatctatccgccacgtgtcagcaacatggctgcggatgtgaagcttttgcattgctatgcatgggaagaaagtggctttccacaaggttggatcaataatttcaaccgtgaattggatgcgatcctttgcacttcagaacatgtgcgcaaagtattgattgataatggtactaaagttcccgtttttaatgtcgggaatggttgcgagcactgggagcggattcagtcagccaatcctccgcaactgaacgccaaagcattcaaattcctgcatgtttcttcgtgcttcccgcggaagggggttcaggcgatgctggcggcctatggcgccgcttttaccggagaggatgatgtttctctggtcatcaaaactttccctaacccgcacaatgaaattcaggcatggcttacgcaagctcagaagcggcacgtcaattatccccatgtcattattatcgagcaggatatgccggaacaagagctgaaagcgctctatgaacagtgtgatgtcttggtggcggcaagctgtgctgaaggatttggtttgccgattgcggaggcgatgttgagcggtttacccgctatcaccactggttggagcgggcagcttgatttttgcacgcaggaaaattcatggctggttgattatcgttttgaacgcgcgaagacccattttggcctgttttcttcatcatgggtgcatgccgatattgataaactggccgaggcgatggcgcaggcggcggcgactgacaaaaagcaactatcggcaatggcagcaaaagggcgtgaactgatacttagtcagtttacctggagctcggttgcgcagcgatcaaaggctgcggtaggcgaattgcgtaagcattttgacgtcgctcaagtggaaccccggattggctggctctcgacgtggaataccaaatgcggcatcgccacctattcccaacatttggtagctgacatgcccagcgaccaaattgtgatttttgcaccgacagcaaatgatctggtacatgcggacgaaggtaacgttctgaggagttgggttgttggaaaagaagacaactaccttgatgctttagatactcaaattgaaaccctgaatctgaataccttggtcatccagtttaactatggattctttaaccaccgcgagttatctgcctttatcaaaaggcatcaccaggcgggacgggttatcgttatggccatgcattcgacggttgatccgatcgaaaaagagccgtattggaatttccgtttatcagaaatgactgacgcgttgaaaatgtgtgaccgtttgctggttcattctattgctgatatcaaccgcctgaagttgcttggactagtcaataatgtcactctgttcccacatggcgtgattaactatcccgctctggcatcgactgctcatcgtaatctgccgcctttggttgccagctatggtttttgcctgccgcataaagggttgaaggaacttatcgaagccgtggcctatttgaaaaaagcggggaaccctattcgactaaggttggtcaatgcggaataccccgtcagtgaatccaccgctttggttcgtgagcttaaagagactgcggctaatttgaaggttgaagatctggttgagatgcataacgattttcttgatgataaagaaagcttacgtctgctctctgacgccgatctgctggttttcgcgtatcaaaataccggcgaatcggccagtggtgccgttcgctacggcatggcgacgcataaacctgtggcagtgacgccgctcgctatttttgatgatcttggtgacgctgtcttcaaattgaagggaacctccgtagtggatgttgctgaaggtattgcagatattatttctgagattgttaaaaactcttcgagtgcagttgaaacgcaacgacgtgctgatgcgtggtgcgagcagcatgattatcatgccgttgccagacggctagaaaacatgtgtgcgggcttgttaagagcaaaacatttcaaataacctcctctagctatagccttattcaatgcagtaggtgtgatttctactactgcattgaatctactatgttgaaagcatagatattctatggaatgtgactttagatgaaaataattctttccgttgagcctatcaagttcccgttgactggcatagggcgttatacctatgagttggcaaaaggcttgcaaagccacaacgaaattgaagaactaaattttttctccggtacccgttttttatctaacatacctacggcaaaaaatacatctgatagtagtcactggttgaaaaaaattgtgcagagcaattcattggctattgagacctacagattgcttatgccacaactaaaaaagaaggcgctgcgtggctacgaacgttgcctttttcatggacctaattatttcctccctccttttgacggccctgcagtggcaacgtttcatgatctttctccttttaaatgggagcactgtttcgatcctaaaaggaatcgttataccaagaaagaaatgatgaaagcattatcgagggcgaatggtctcatcacggtctcgaactatattcgtaaagagattcatgaatatttcgattatccaattgagaaaatccacacggttcatctggcaagctcgcctgatttttaccctcgtcaggtagaaaacgtatctggagttttaaaaaaatttgatttaagctataaagccttcaccttattcgttggtaccattgagccgaggaagaatattctttcccttattcatgcttatagaaaactgcctgacggattgcgtgcccgttatccattagtcctctccggctataagggatggcgcaatgatgacattatgcaggaaatagagcgaggacagcgtgagggatggcttaagtatctgggatttgcggctgcagaagaattgccattattgtactctgcagccaggctgtttgttttcccatcacactatgaaggctttgggcttccggtattggaagcgatgagctcgggaactccggtgatttgttccaacagttcatctttgccggaaatcgcaggtgatgcggcattaactcactctcctgaggatgtcagcttattaacgcagcttattatcagagggctgacagatgaagcgtggagaaaggatgcaattgcattaggtttgtcacatgcagcaacgttttcctggaaaaattgcactagccaaactttaaacgtttatcaaaaattgactaataatgattaaagtactccatttttataaaacctattatcctgactcatttggcggcattgagcaagtgatataccaactcgctgaaggtggggtagagaagggtatatcgacggatgttttgtccgtaacgcctgcagataaggatagttgcgaaactatttcacagcatacagctcataaagtcagacaagatttcagcattgcatctaacccattttcatttcgtgtcataaagaaatttaaagagctcagcgagcaagcggatatcatccactatcatttcccatggccatacatggatcttgtacacttcctctcgggagtgaataagccgacagtagttagttatcactctgacattatcaggcaaaaaaaccttcttaggttatataagccactgatgcacctgttcttgcgtaaaatagattgcatcgtagcaacatcaccgaactatgtggccaccagtgacgtattggaaacgttcaaaaataaagtctctgtgattccgataggtctggataaagagacatatccggtgccagagccgagccgcttggaaaaatggcagcgtcagctcggccaaccatttttcttatttattggcacgttacgctattataaagggttacatatactgctagaggcggctatcggtgcaaactatcctatcgtgatcgtaggggccgggccgatcgaaagtgaattgcgtgagcaggctcagaacttgggactgaaaaacgttcattttcttggcgcattgccggatgaggataaatcggcactactgacgctgagctatggtattgtatttccgtcacatttacgctcggaagcgtttggcatttcgctactggaaggtgccatgtaccgaaaacccatgatttcaagtgaaatagggacaggaactacctttatcaacgtcaatgatcagacgggactggtgatccctccatcggatccttcggcattgagaaaggcaatggataagctttgggagaaccccaagttggcggagacattcggtaataaggcgtatgaacgctacgaagagatgttcacctccaaacaaatggtcgaggcatacgcgaaaatctacgaatccctgctgggaaggcataataagcccgattgaatggtctggcaggttactgaaaatttagacgagttatgtgacctatcgcaccaatcactacccacccggctcaatcctgagttaacatgtgtgccacatcacaaaacctgctggccgacgttgccggcagggtcatcctcagacaggagttcctaaatgtccaagcaacaaatcggcgttgtcggcatggcggtaatgggccgcaacctcgcgctgaacatcgagagccgtggttacaccgtttccattttcaaccgttctggcgacaaaactgacgaagtgatcgctgagaacccgggcaagaatctggcgccgtattacaccgttgaagagtttgtcgaatcactggaaaaaccgcgccgcatcctgctgatggtgaaagcgggcgaagcaacggataaaaccattgcctcgctgactccgcacctggacaagggcgatatcctgatcgacggcggcaacacctactatcaggacaccatccgtcgtaaccgcgaactgtccgaccagggcttcaacttcatcggcaccggcgtttccggcggtgaagagggcgcgctgaaagggccttccatcatgcctggcggccagaaagaagcttacgagctggtggcgccaatcctggagaaaatcgctgcggttgcggaaggcgagccttgcgtgacctacatcggcgcagacggcgccggccactatgtgaagatggtgcacaacggcatcgaatacggcgacatgcaactgattgccgaagcctattctctgctgaaacaggcgttgaatctgagcaacgagcagctggccgaaaccttcgccgagtggaacaagggtgaactgaacagctacctgatcgacatcaccaaagacatcttcaccaagaaagacgaagaaggtaaatacctggtcgatgtgatcctggacgaagccgccaacaaaggcaccggcaaatggaccagccagagctcgctggatctgggcgaaccgctgtcgctgatcaccgaatcggtattcgcacgctacctgtcctcgctgaaagatcagcgcgttgccgcgtctaaagtgctgaccggcccgaaagtggcgccgttcactggcgacaaagctgaattcatcgagaaagtgcgtcgcgcgctgtatctgggcaaaatcgtgtcctacgcgcagggcttctctcagctgaaagccgcgtctaaagaaaacaactgggatctgcactacggcgaaatcgccaagatcttccgtgccggctgtatcatccgcgcccagttcctgcagaagatcaccgacgcttacgcagcggacgccgatatcgccaacctgctgctggcgccatacttcaagcaaatcgccgacgagtaccagcaggcgctgcgtgacgtggtggcctacgccgtgcagaacggtatccctacgccaaccttctccgccgcgatcgcctactacgacagctaccgttcagcggtgctgccggcgaacctgatccaggcgcagcgcgactacttcggcgcgcacacctacaaacgcaccgacaaggaaggcgtgttccataccgaatggatggaataaccccgcccgttgagcgataaaaaaagccgccgaggttaacgcccggcggcttttttattgcgtgcgagttaacgtcatgcttttttctgatgccgctcgcgcagccggccgatcaccgcgctcagatccagatcctggtcctgcagcagcaccagcaggtgatagatcaggtccgaagcttcgttggtcagctcttcgcgatcgttgaccgtggcggccagcgcggtttccacgccttcctccccgactttctgcgcgatgcgcttggtgccgctggcgtacaggctggcggtgtatgagctgtccgggctggcgtgcttgcgctccgccaacagctgttccaactgatagaggaacgtccagtcgctggcggccggatggaagcagctgctgttgcccaggtggcaggtcgggccgatcgggttggccaataccaacagcgtgtcgttatcgcagtccggcgtgatgctgaccaccttgaggaagtggccggaactttcgcctttggtccacaggcgttgcttggtgcgcgagaagaaggtgacgttgccgctctgctcggtggtcgccagcgcttccggcgtcatgtaacccagcatcagcacttcgccggaaacggcgtgctgcacgatggccggcatcaggccgtcggttttttcccagtccagctggtttctctgttgttctgtcagcacacgcgaatctccacgccttgttcgaccaggaaccttttcagttcgccgatattgatgatttgtttgtggaacaccgatgccgccagggcgccgtcgacgtccgcatcgcggaacgcttccaggaagtgctccatcgtgcccgcgccgccggaggcgatcagcggcactttgcagacctcgcgcacctggcgcagctgctgcagatcgtaaccgttgcgcacgccgtcctggttcatcatgttcagcacgatctcaccggcgccgcggcgctgcacttcctgcacccagtcgagggtttcccactgggtgacgcgggtgcggctctcgtcgccggtatattgattgacgtgatacttgccggtttcactgtcgaaccaggtgtcgatgcccaccacgatgcactgcacgccaaagcgatccgccaggcggctaatcagatcgggatcggccagcgccggcgagttgatcgaaatcttgtcggcgccgaaagacaggatctggctggcgtcctcggcgcttttaatgccgccggcgacgcagaacggaatatcaatcacctccgccacgcgcgacacccagcttttgtccaccacccggccgtcgctcgaggcggtgatatcgtaaaataccagctcgtccgcgccttcttgcgcatagcgctgcgccagcggcacgatgtcgccgatgatttcgtggttgcggaactgcacgcctttcaccacttgcccgtctttaacatccaggcacgggattatccgttttgccagcatgcgatcgcctcctcaacgctaaatttaccttccagcagggcgcgccccacgatcacgccggcaacgccgctgctgcgcagctgggcgatgtcgtccagattgccgatgccgcccgaggcctggaaggccacctgcggataacggcggctgatttcctgatacagcgccacgttggaaccggccagcgtgccgtcgcgcgaaatatcggtgcacagcacgtgtttcagcccgtagggcaggaactgttccaccacctgttcaagcgtggcgtcggagtcttcctgccagccgctgatggccacgcgcttcacgccctgcgcgtcgatgcgcacgtccaacgccagtaccagcgcgtcggcgccgtagcgttcgaaccagctttgcaccaactgcggctgtttcaccgcggtggagccgatcaccacgcgcgtggcgccggcctccagcagggcgctgacgtcttgttcgttgcggatgccgccgccgacctgcaccggcacctcaacccccgccagcagcttgcgcagcagcgggatctggcgcgccgccggatccttggcgccggtcaaatcgaccagatgcagcacctgggcgccctgttgttgatagtcctgcaggcgcagcagcggatcgttgccgtagtcgcgctgttggccgtaatcgccctgatgcaaacgcaccacgttgccgtcgatcaaatccaaagccggaataatcatgctgcctacatctccagaaagtttttcaacagttgcgcgccggccgctccagatcgttctggatgaaactgcacgccgaagaagttgtctttttgcacggcggcggtgaagggctcgccgtaattcgcctgggcgatggtgctggggcatatcggcatcgcatagctgtgaacgaaatagaagtaggcgccgtcatcgatgccgcggaacagatggtggcccgcctgcgcggatacctggttccaacccatgtgcggcagcggcaggccgaagtcggtcatctgcttgaccggcgtatcgatgaggccgagcgtggtcacgccgccgttctcttcgctgctggccgccagcagctgcatgccgaggcaaatgcccagcaccggctgcgtgcaggccctgatcagttcgatcaaatcgcgctcgcgcagctgatccatcgccgcctgcgcagtgccgacgcccggcaggaacagcttgtcggcgcgcagcacgatctccggatcgcggctcacctccggctgataacccaggcgccgcaccgcgtaggtgacggaggccaggttggcgcagccggtatccaaaatcaccacgttcatcacagcactcctttcgaactcggcagggtattgccctcgacgcggatcgcctggcgcagcgtgcggccaaacactttgaacaggctctcgacccggtggtggtcgtttttgcccttggtcttcaggtgcagcgtgcaacccatggtgtaggagagcgaacggaagaagtgctcgaccatttcggtgctgagatcgccgacgcgctgatagttgaactcggccttgtactccaggtgcgggcggccggagatatccagcgcgcagcgcgccagacactcgtccatcggcagcacgaagccgaagcgggcaatgccgcgcttgtcgccgagcgccttgttcaacgcttcgcccaacgccaggccggtgtcctctacggtgtggtgatcgtcgatatacaggtcgcctttgacgtcgatctccatgcggaagccgccgtgggtggcgatctgatccagcatgtgatcgaagaagccgacgccggttttgatcttgctgccgccttcgcgatccagccagacgttgacgtcgatctgcgtctctttggtcacgcgattaacccgcgcgtgacggtcacgcagggtcaactggcgcacgatctctttccagcccagcacgccgcgctggtaacgcagcccctggatgcccatgttttccgccagctgcacatcggtcggccgatcgccgatcacgtaactgtgcgcggtatcgagcacgccgggttcaaggtagcctttcaccagcgcggttttcggcttgcggcagtcgcagttgtccgccggcaggtgcgggcagatcaacacatcggcgaactgaatgccctgcgagctgaggatctgcatcatcaggttgtgcggcggatcgaaggtttcctgcgggaaactggcggtgccgagcccatcctgattggtgatcatcaccagctgatatcccgcctgttgcagcgccagcagggaagggatcacgtccggctcgagcgccagcttgtccaggcgatcgacctggaaatcttccggtggctcggcgatcagcgtgccgtcacggtcgataaagaggattttttggctcacattggctcctggcgagtctggttggcgccgggcagggcggacaaggcgtccaccacgcgttgacattcgtcgcgggtgcctatggtgatgcgcaggcagccggacaacccgggctgtttgttttggtctcgtaagataatgccctgatcccacaagcttttaaacacattacttgaggcggtgaagcgggccagcaggtaattgctgtcgctggcgaaaacctgctcgacgcaggcgcatttttccagctgttgctgcagccagctgcgggtggctgcgatgtcggtgacgcgctggcgcatggtgcgaataccttcttcgctcagcgcctgcgcggcgatatccgccaccggcgtcgagagcgggtaaggggcgatcaccttcagcagcagggcaatcagatcttcattggcgagtgtaaagccgcagcgcaggccggccagcgcaaaggcctttgacagcgtacgcagaatagccaggtgtgggtagtcgctcagccaaccggccaccgaagcctgcgggcaaaactcgatataggcttcgtccaccgcgacgatcgctttgcctttggccagttccagcagactgcgcagagagtccgggtcgatcaggttgccggtcgggttgttcgggctgcagacgtagatcagcttcacgttatccaggctgtccgcgatggccggcagatccagttgccagtcctctttggcggccacggtgcggcgctccacgccaaaggtttcggcgctgacggcgtacatgccgtaggtcggcgggcagaacagaatggcgtctttgcccggctcgcagaaggcgcgtatcagcagctcgatgccctcgtcggcgccgcggctgaccagcacctgctctttcttcaccccggcataggcggcgtagcgttcgatcacctgcgccggctggcactccggatagcggttgaaggtttgcgcggtcagctggaattccggggcgatcgggtattcgttggcgttcagccatacgtcgcccttgccgccgaggcggcgcgccgattgataaggggtcagctcgcgaacgttggcgcgcgccagtttttcgatgctcatgcttgctccttcagggcggcgacgcgcagggtcacggcgttcttgtgggcgatcagctgctcggcggcagccagcgtctcgatggtggcggccaggttgctgaagccctgcggcgtcagctcctgcaccgtcatgcgtttttggaaatcggccagcccaaggctggagcaggtggcggtgtagccgtaggtcggcagcacgtggttggtgccggaggcgtaatcgccggcggattccggcgaccagtcgccgaggaacaccgaaccggcgctggtgatgccgtccaccagttcgcgcgcattgcgggtctgaataatcaggtgctccgggccgtagcggttgctgatcgccacgcactcagccagatcgcgcgctacgatcaggcggctgctcgccagcgcctgacgggcggtctcggcgcgtggcagctcggccagctggctttccaccgcttcggccaccgcctgcgccattgccgcgtccggcgtcagcaggatcacctgcgaatccgggccgtgttcggcctgcgacagcagatcggaagcgacgaacgccggagtggcgccggcgtcggcgatcaccagcacctccgaagggccggccggcatgtcgatggccgcgccatcaaggcgctgactgacctgccgcttggcttcggtcacgaaggcgttgcccggcccgaagatcttcgccacgcgcggcacgctctcggtgccgaacgccagggcagcgatcgcctgcgcgcccccgacctgaaacacttcctgcacgccgcacagctgagccgcatacaggatctcatcggcgatcggcggcggtgagcacagcaccacccggcggcagccggcgatgcgtgccggcgtcgccagcatcagcacggtggagaacagcggcgccgatccgccgggaatatacaggccgaccgagtcgatggggcgggtcacctgttggcagcgcacgcccggctgcgtttcgacgtccaccggcggcagccgctgcgcgttgtggaaggtttccacgttggcgacggccaccgccatcgcctgtttgatgtcgtcgcccaaccgcgcggcggcggcggcgatctgctcggcgctgacgcgcagcgccgagacttccgccttgtcgaaacgggcgctgtagtcgcgcagcgcccgatcgccgttggccttcacgttgtcgaggatctcgctcaccgtgcgggtgatgctgtcggaggcggcgatggccgggcgcatcagcagctcggcctggcgttcggcgctgctggtcgcccaatcgatcggcgtgttgaaggtcgacatggcgttactccatcatcttttcaatcggcagtaccagaatcgagctggcgccgagcgctttcagtttttccatggtttcccagaacagggtttcgctgctcaccatgtgcatcgccacgcggttctgcgcgccggccagcggcagaatggtcgggcgctcggcgcccggcaacagcgcgacgatctcgtccagtttctcgctcggcgcgtgcagcatgatgtatttggattcacgcgcctggatcacgccctgaatgcgggtcatcaggcgatcgatcagctgctgtttggcttccggcatttcgccgtcgcgctggatcaggcaagccttggagcggtagatcacttcgacttcacgcaggccgttggcctccagcgtggcgccggttgagaccaggtcgcagatggcgtcggccagaccggcgcgcggcgccacttccaccgagccgttcagcaggcaagatttgaagcgcacgccctgcttgtcgaggtattgcttcagcaggtgcgggtaagaggtggcgatgcgggcgtcctgcaggctttgcgggccggcgtattcggcatcgagcggggtggccagcgacaggcggcagccgccgaaatcgaggcggcgcagcgtgaagtaacgcgggtcttcgccctgggcgcggcggctgagcagctcttcttccagcacgttttcgccgatgatgccgagatcgaccacgccgtccatcaccaggcccggaatatcgtcgtcgcgcacgcgcaggatatcgatcggcatgttctcggcgaaggcgatcagacgctgctgctgcaggttgatcttgatgccgcagcgcgccagcagttcctgggattcatcgctcaggcggcccgacttctgcattgcgatccgtaaacgtgtcttgtccagcatggtaacctctgtttaatctgtaattttatgaatttattgtaaaaactattctttctgtctgtacggagccaaaaaaaaaccctcggaagaaatcttccgagggctctctcttgcgttctgcgcgccactggaagattaacaaaccgtcttccagcactcatcgcctgaaagactagtcagggtgatggtgatgatggtggttgaactgaacgcgtgtcatggtgtttttctctaatcaaaagccggtaaaaaccgtatgccaattaagctaaactatccgctgtccaccgcgcaacccttttttaacgtcataaatttaatttattgaaacaggttaggttattagccacagacagctttacctgaccttaagccgggcagattgtatcgccgtgcgcagtggcgtagccttaggggtagggcgctgcgatcttcaggagaggaagaggatgaaaaaggtagccattattggtttgggttggctgggcatgccgttggcgctgtcgctgatggggcgcgggtatgacgtggtcggtagcaaaaccacgccggacggcgtcgaggccgcgcgcatgagcggcatcgaatgctaccaactggaactgacgccggagctggtgtgcgatccggacgatctggaatcgctgctgcgcgtggatgcgttggtggtgacactgcccgctcgccgcaccgtcgaaggcagcgaaaactatttcaatgcggtgcgtatgctggtggacagcgcgatggcctttggcgtgccgcgggtgatcttcaccagttccacctcggtgtacggcgaaaccgcaggcacgctgcgcgaagagtcgccgttgcggccggtctcgccgtcagggcgggtgttggccgagctggaacgttggctgcatgaattgccgaacacctcggtggacattctgcgcctggcggggctggtgggcgccgatcgtcaccccggccgcttcctggcgggcaagctcgacgtgaagggcggttcgcagggggtgaatctggtgcaccaggacgacgtcatcgccgccatccagctgttgctgaagctgccgaagggcggccacgtgtacaacctgtgcgcgccgcgtcatccggccaagcgcgaattttatccggcgctggccgagcagttgcatctggagccgccgcagttcgccgacgaggcggagcaggacgagcggctggtggacggcaaccgcatctgcaacgagctgggttttgaataccagtatcccgatccggcgcgcatgccggtcagttaacgtccgtcaggccccgcgcatgcggggctttttttcgccggcgcgcgccaaatcctccagcagcgcgttcaacgcctcgttgggctggacggggcggctgaccaggctaagcgtggcgcgataagagagcgccgtgccgcccaactgccgcagcagcccctgttccacccagcgcgccgcgtagtgggtgggcagatagccaagacaggtaccgctcagcaccagatgggcgacgctttccatatggtgagccaccgccgccaagtgaggcggcgcgatcgggcacagctgctgcgccagcaggtagccgcgcttgacccagcgcgcgttttcaatctgctcgcgctcggggtcttccaccgcgaacagcgggtgatccgtgctgcagtagatcgcctgtatttcctccagccacggctgataacgtaactcctccagctgttggccgaagtaaccgatgcccagatcgagctgctggtgcagcagcccttgctcaatctcgttcggcgaacagatgcggcactgcaattgcacgtcctgatggcgccgctgaaagtgcttgatggcctggctgaacggattgcccggcagcgaaaccagattgtccaccagaccgatttgcagatcgccggtcagcaggccgttcagcgactggctgacccgggtgaagtcgcgggcggcgttgaacagcgaacggcaggcgatcagcatgcgttcgcccttgggcgtcagccggaagccggagcgcccgcgttggcacaggcgaaaacccagtcgggtttccaacgaggccagatgggtgctgatggtggattggttcatcagcagcgcttcctgcgcggcgctgacgccctgggcttccgctaccgcgacgaacacccgcagcagtttcagatcgatatcgcttaggttggtgagcattccccctccgcagaacgtcggccggttaacccatttttaacatcgaagaaataggtgcggcgctgaagatatggcctttcttatggcatgaggttgaaataaaaatcaatacttcaataggttagttgcatcgcgttttccgatgtttacatgcaaaagcgggaatggtagccgaggtggccaccggggtagcctgcgaatgttgctcaaatgtttcaatccatcgcagataacgacaaggaaacgccatgctgaaccaaccccaaagcggtaacgatatgccgcgctttgccggcctccccaccatgatgcgcctgcccgcggcagaacaggcgcgcggtctggacgccgcctttgtcggcattccgctcgatatcggcacctccaaccgcagcggcactcgctatggcccgcgccagatccgccaggaatcggtgatgatccgtccttacaacatgggcaccggctctgcgccgtttgaacggctgcaggtggccgatctgggggatgtcgccatcaacccctacagcctggcggacagcgtgcagcgcatcgaggcggcttaccacgagatcctggcgcacggctgcacgccgttgacgctcggcggcgatcacaccctgacgctgccggtgctgcgcgccgtcgcccgtcgtcatggcccggtcgggctgatccacgtcgatgcgcattccgataccaacgaggagatgttcggcgaacagctggcgcacggcaccaccttccgccgcgcgtttgaggaggggctgctggcgccggaaaaagtggtgcagattggcctgcgcggcagcggctatgcggcggatgacttcgactggtcacgccgccagggctttcgtgtggtgccggctgaggcctgctggcaccggtcgctgacgccgctgatggcggagatccgcgaacagatgggcgaagcgccggtttatctcagcttcgatatcgacgggctggatccggccttcgcaccgggcaccggcacgccggaggtcggcgggctgtcggtctggcaagggctggagatcgtgcgcggctgtcatggactgaacctggtcggcggcgacgtggtggaggtgtcgccgccttacgatcgctccggtaacaccgcgctgctggcggccaacctgctgtttgaaatgttgtgtgtgctgccggcccgctgaggccggcgcactgactctaccggcggagcggttgcgtcggggcccctgataacaataactacggagtggaggtacccatgaatctcgatctgctggtcgtggtgttttactttctggtgataggcgcggtggggtggatgggcattcgccgcgccaattccaaagaggcgtatctggtggccgggcgcaacctggggccggggctgtatctgggcacgctgtcggcggtggtgctcggcggcgcgtcgaccatcggcagcgtcaagctcggctacacctacggcatctccggcgtctggctgtgcggcgcgctggggctgggcattgtggtgctgagtctggtgctggccaagccgctgctcaaactgaagctgtataccgtcagccaggtgctgtcgcggcgctatcacccggcggcgcgggtcaccagcggcgcgatcatgctggcgtatgacctgatggtggcggtgacctcgatcatcgccatcggcagcgtgatgcaggtgatgttcggcctgtcgttcagcgcgtctatcctgctcggcggcgggctggtggtgctgtattcgacgctgggcggcatgtggtcgctgacgctgaccgacatcattcagttcatcatcatgaccgtcggcatgatgctggtgctgatgccgatgagcatcgtcaaggccggcggctgggaggcgttcaccagcctgctgcccgccggttactaccagctgtcgtcgatcgggctggacaccattctggtgttcttcctgatctacttcttcggcattctgatcggccaggacatctggcagcgggtgttcagcgcccgcagcgccaatgtggcgcgcttcgccgggctgggggcgggcgtctattgcgtgctgtacggcgtgaccggcgcgctgataggcatggccggcaagatcgtgctgccgtcgctcagcaacaccgacggcaccttcgccgccatcgcgcaggcggtgttgccggtcggcgtcagcgggctggtggccgccgcggccctggcggcgctgatgtccaccgccagcgcctgcctgttggcgtcttcgaccatcgcgctggaggacgtgctgccggccatccgccgtaaaccttccggcgggctggccgccgggcgcttcaccacgcttttcatgggcgcggtcatgctggggctggcgtttgtggtgcgtgacgtactggcggcgctgacgctggcttacaacctgttggtgggcggcatgctgatcccgctggtgggggcgatcttctggccgcgcgccaccagcgttggggccatcgccagcatgctgaccggcagcctgtgcgtggtggggctgatggtctggcacggcatcgacgccaacagcccgatctacggcggtctgctgggcggcggcgtcgccttcgtgctgggcagcctgctgagccgcccgacgccgcagctgcaggcgcaaactgaacgctgaggcgcgatccgggcttttatcacggcgcctttactgatttactgaggagcagggcgcatcgccgccctgttggtttaacggtgagggtaaggagagggtgagtcatgggtaaaatcagcgtcgcatgctgccagttagcgctgcgggtaggggaagcagagcataatcgggcgcagtccgctcaggcgatccgtcatgcggcgcagcgcggcgccaacgtcatcgtgttgccggagttggtgaacagcggctatgtattgcgcgataaggcggaggcgtgggcgttggccgagaccgaagacgggcctagcctcagcctgtggggggccctggcgcgtgagttggatgtggcgatcgtcgccggtttctgcgagcggctgcccgatggtggggtggccaacagcgcggcattgatcgatgcgcagggcgtgagggcgatttatcgcaaggcccacctgtggcatgaggagagcacgatctttacccccggcgatcggccgccaccggtcgtcgagacccgctttggccggttggcggtgatgatctgctacgatcttgaattccccgaatgggtgcggctgccggcgctggccggcgctcagctgctgtgcgcaccggttaactggccgcaggcgccgcgtccgcagggcgaacggccggcggagatggtgaaggcgcaggccaacgccgccgtcaatcggctgttcatcgcggtgtgcgatcgctgcgaaacggagcgcggcgttgcgtggatcggcggttcggtgatcgtcgatgccgatggctatccgttgacgcagagcctgacaggcgaaggcatggcgctggcggaaatggatatcagtatggctgatgacaagcgcatcggccgctacaatcatgtgcatcgcgatcggcggccgatgctgtattgaagcggcggggcagtcggcggatccggctgccccgccgatcgtttctccggcggaaaaatccgccgttttggcgcttacagccagcctgatttcttcagcttctgatacaggaaaatacagccgacggcggtcgcccccagcgtggcgtgataggcccacgggaatttcaactccggcatgtcggcgaagttcatcccgtacaggctgaagatcaccgtcgggatagccaaaatcgccccccaccccgccagccgtttcaccacttcgttttgtttgaccgtcaccagcgccagattgacgtgcatggcgttggtcagcatttcgcgcatgtcgtcgatgttgctgaccacctgatgcgcgtgatcctgcacgtcgcgcacgtaggcgcgcagctctttcgggatcacttcttcgtgcagacggatcagctggttgcagatttcatccatcggcagcgcggcgttgcgcagcgccagcaggtggcggcgcagagtatagacgttctcgatcgccgcctgatcgaactccgactgaaacatgttggcttcgatgttctcgatggtgctctcgaagcgcgttaccacgctgcggtagttatccaccacgaagtccaacaccgaatagagggcgaagcccggcccgcggcacatctgcttgtggttctcttccgccttggcgcggatcggcgcgtagctgggtgaggcgccgtggcgcaccgtcaccagaaagtttttgccgacgaagaagtgggtttcgccgtattcgatttcgtcgtgctcgccccactgcgcggttttcaccacgatgaacagcgagtcgccgtaggtctccagcttcggccgctggtgcgcacacagcgcgtcttcgatcgccaaatcgtgcaggccgaactcctcctgcaccttgcgcataaacgccggttccggctgccgcaaccccagccagacgaaggtgtccggttgtttaaccacctcgctgatatcgtcgatggtcacttcgcccagccgttggccggctttgtacgccacacagttcaccaccatgcttttgctgtccatctgtccatccatcaatcagtcagggttttggtaagaaaatagcactcatgttccaccggatactctttcagcgtcatttgcagctgatagccgagcttttcgtagaaaggtcgcgcctggaagctgaaggtgtcgagacgggcgtagcggcagccgcgcgcctgcgcctcgtgctcggcggcgcgcatcagccggccgccgaggccgctgccgcgctgggtatccgccacccacagccactcgacgctcagccagttgccccaggtttcggcggtcagcccgccgatcaccgtgccggcctcgtcgcgcgcatagacgctgagcggcttgcggtggctggcgtcgatatgcggctggttgtaagcgcgcaggccttgcctgatcgcatcgagggtatgttcgtcaatcgcgtcggtaacggtaatgtccatttttcctcctgggttatggattaacttaagcacactgcggctaaaagacaacccgttgaaatgtaatgtaaacacccattacgacgggctgggctacactaaacgggtcatttcatcttcaggaggacgccatgccccgattgactctgctggccggtttgctgctgtgcagcggcctgctgcacgccgcgccgacgatcagccaattgcaggacggcctggaacacccatggtcgctggccttcttgccggcggaacaaggcttgcttatcaccgaacggcccggacggctgcggctgtggctgcagggcaagggcctgtcgccgccgatcgccggcgtgccgcaggtctacgccgaggggcagggcggcctgctggaggtgttgccggcccccgacttcagcgccagtcgccgggtatatctcagcttcgccgaaccgggcgagggcggcaaagccggcacggcggtcggctatggccgcctgagcgacgatagcgcgcggttggaaaactttaaggtgatcttccgtcagcaacccaagctgtcggtcggcaatcactttggcggcaagctggcgttcgatcggcagggctacctgtttatcgcgctgggtgaaaacaaccagcggccgacggcgcaggagaccgacaaactgcagggcaagctggtgcggctgaccgccgagggcgcggtaccgccggacaacccctgggtcggccaggcaggtaaacgcccggaggtttggtcctacggccaccgcaatccgcaagggttggcgctgaatccgtggagcggcgcgatctgggagcatgaacacggtccgcgcggcggcgatgagctcaatatcccgctgccgggtaaaaactacggctggccgctggccacctatggcatcaactattccggccaaccgataccggaggccaaaggggaacgggtgcccggcaccgaacagccgctgcactattggcgggtttcgcccggcctcagcggcatggcgttttatgacgggcagcgtttccccgcctggcggcattcgctgttcatcggcgcactggcgcaaaaggaactgattcgcctgacgctggagggcgacaaagtggtggcggaagagcggctgttgggcgatcgcggcgaacgcatccgcgaggtgcgcagcgggccggatggctacctgtatctgctgacggacgaacgggacggcaagctgctgaaggtcggggcgtcgtaacgccccgcacgcgtcaggtgagtgcgctcatcacgccgcgctggtaggccgggcgtgcgtgcagctgctgataccagcgctccatgttcggccgtgggcggcgagcgatcggcatttcgaaccaggcgtaggcgaagctgccgagcgggatatcgccgaaaccgaacgcgccgccggagaggtaaggctggtgcgccagcgtctgttcgatgacgtcgaagtgtttttccagcgtggcgatcgccgcttcgattttcgccatgtcgcgcaactctggcgcagtgcggatcaggccccaaaagacgatggtgaaggccggaacgatggtcgaggtggtccagtccatccatttctcggcggcggcgcgcgcctgcagatcttgcggatagaacgtcgcgtcgccgaatttcgccgccaggtagcgcacgatggtgttggactcccacagcacgaagtcatcgtcctgcagtaacggcaccaggccgttcgggttcagcgcgcggtaactctcttcgttgaccttgccaaacgccccgccggcgttgatgtgggtatagctcagccccagttcggcggcgcaccacagcaccttcctgacgttgttcgaattctcacgaccccaaatggtcagcatgggataactccgttagcggattaaagacccttaatacctacgccacaatgcgctttttgtcacaccgcagggcattttttgtctgccgctcagcgttcccagcggcacacttcccagccgtgctccgccgccagcgcgctcagttcgctgtcgggattgatcaccgtggcgctgtcgacgaattgcagcatcgccttgtcgttgagagagtcgctgtagccgtggctgtgctcgaacttcaggtgcgggtggtgcgccagccagtgctgcaggcggatcaccttgccctgttgataggtcatggtgccgtaggtgttgccggtgaagcggccgtcgctgatttccacgccgatcgccagcgcgtcgtcggcgccgagctgttcggcgatcggcgccaccaggtgttcgccggtggcggagatcaccagaatgcagtcgccgcgctcgcggtgccactgcaggcgttcacgggcggcgggatagacgcgcggcaggatgtcgcgccggatgtagcgttgcacccagccggccacggtttgcacgctcaggccggtcagcggcgccagcgtggcctgcatgtagtcctccatcgacagcttgccctgataatagagctgcatcagctgctgctcctgcagttccagctccgccggcgcgaacccctggccgaccagccagcggatccacaggctggcgctgtcatcgtcaatcagggtttcatccaggtcgaataaggctaaatccatcagtatttctccggcaggcagggtatgaggtcgtttacaggatagcggatagcgcacgtcgccagccagcggcgtcggcgaaattgcgcagagcataagaaacattgatgacggttttgcgacagtttgttgaacgtttgcataacttagaacgcaacaatattggccgccccggcgagcgcggtggtaactatggggcaaatgcagccacccgctggggagggtcaatgttgattattcgcctgtacggcagcccgatcgtaatcggggaagaagaggaaccgcatgatgacgcatctgacgacgctgaagacgttgccgctgctggatctttcgcagcttgacggtgatgcgcgccggcggcgcgcttttcttgacgatttgcgcgcggcggcgcgcgacgtcggtttcttctatctgcgcggtcacggcgtggacggcgcgttgaatgcgcggttgcagcacgccgcgcgacaatttttcgccctgccggaagccgacaagctggcggtgcagatggtgcattcgccgcactttcgcggttacaaccgggcggcggcggaactcacgcgcgggcagcctgactggcgcgagcagttcgatatcggcgctgaacgcccggcgctgacgctggctgacgacacgccgcgctgggcgcgtctgcaggggccaaaccagtggccggcggtgctgccggcgctgaaaccgctgctgctggagtggcaacaggcgatgaccgccatgtcgctgcggctgctgcgcgctttcgcattggcactttcgctgccggagcaggctttcgatcgcttatacggcgagaagcccaacgagcacatcaaactgatccgctacccggggcgggacgccaccgccagcgcacagggcgtcggcgcgcacaaggactccggttttctcagcttcctgctgcaggacgcgcaaaaagggctgcaggtggaggtcagcgaggggcaatggatagacgcgcagccgcgtgaagataccttcgtagtgaacatcggcgagctgctggagctggcgaccaacggctatctgcgcgccacggtgcaccgggtggaaacgccgccggcggggagtgacagattatcgatcgcgttcttcctcggcgcgcgtctggacgcggtggtgccgctgtaccaactgccgccgcagctggcggcgcaggcgcgcggcccggccagcgatccgctcaatccgctgctgcgcgatgtggggtataactacctgaaaggccgcatccgctctcaccccgatgtggcacaccgtttttatcaggacgtcatcggcctctgaacgccgggcgtaaaaaagcccggcgcgtcggccgggctgatcgagcgctgatgcggcgattattccgccagcgcctgctgcagatcggcgatcagatcttccacatcctcaatccccaccgacaggcgcaccagctgcggcgtgatgccggttgccaggcgctgttccagcggaatggaggcgtgcgtcatgctgaacggctggctgatcaggctttccacgccgcccaggctttccgccagggtgaacaggcgcgaacgctggatgacccggcgcgcataggcgtcgtcgcctttcagccgtaccgagatcatgccgccgaagcgcgtcatctggcgcgccgccagctcgtgctgcgggtggctcggcaggccgggatagtagacgttttccacctgcggctggctctccagccactgggcgatgcgcagcgcgctgtcgctgtgacgctgcatgcgcagcgccagggtgcggacgccgcgcagcgtcaggaagctgctgaacggatcgagaatgccgccgaccgcgttttgcaggaaaccgagctgttccgccagcgccgggttatcgcccaccgccgcgacgccggccaccacgtcggagtggccgttgaggtatttggtggcggagtgcaccaccacgtcaaagcccagatccagcgggcgttgcagatacggcgaggcgaaggtgttgtccgccacgctgatgagctggtgctttttggcgatcgcggcgatggcgctcagatccgccagcttgagcagcgggttggtcggcgtttcgacccagatcattttagtgtccggctcgatcgcctgttccagcccggcgagatccgccggcgccacgtaggtgacgcgcaggccggcggtgcggctgcgcactttttccagcaggcgataggtgccgccgtacaggtcgtccaccgcgatcaggtggctgtctttatcgagcagctccagcaccgtggagcaggccgccaggccggaggcgaaggcgtaaccgcggctgccgccttccagttcggcgatggcgctttccagcgcggtgcgcgtcgggttggcgctgcgggaatactcatagccggtatgctcgcctggcgccggttgggcgtaggtagaggtggcgtaaatcgccggcatcactgcgccggtcgcgtccggggtgtaaccggcgtgaacggtcaacgtatcaaacttggccataatgggtccttattaacgtaatttttggcgccaggcgttaagcacgtctgtgcgggtaatcaggccgaggaagcgctcgccgtcgagcaccaccgcgacgtggccatggttgaaggtggcctgtaattcctcgtagccggcttccttttgcagcgtatgaacctgtttggtcatcgcgctgccggccggcaggctgaagtgggcggcgtcggcctggacggcgttcagcagatcccactcatcgatcagaccgaccacccgatcgccttccagcaccggcagctgcgagatgtcgtacagccgcatgcgggcgtgcacgatcgccaacgtgtcgtccggcgcggcggaaacggcgacgccctcgtcgtggcggtaggcgatcagatcgcgcagatcgccgtgttgtggcttgctcagcaggccctgttccagcatccagtggtcgttatacattttagacaggtatttgttgccgctgtcgcagacgaaggtcactacccgcttgggttcggtctgtgcgcggcagtaacgcagggcggcggccagcagggtgccggtggacgatcccgccagcacgccttccttgcgcagcagctcgcgcgcggtggtgaaggcttcggcgtcgccgatgcggtaagcattgcgcacctggtcaaagtcgctgagcggcgggacgaagtcttcgccgataccttccaccagccaactgccggcttcgccgatatggccgtggtcgagatagtccgccagtattgaacccgcagggtcggccagcacgaattccgtctgcgacgaaacctcggcgaaatagcggctcagcccgcccagcgtgccgccggagccgacgccgaccacgatggcgtccacgtcatgctccatctgccgccacagttcgggcgcggtggtggtggtatgggccgccgggttggccggattattgaactggtcgatataaaaagcgccggggatctcttccgccaggcgtttggcgtaatcctggtagtaagccggatgccctttgccgacgtccgaacgggtcagcagcacttccacccccagcgcgcgcaggtggaagatcttctcgcggctcatcttgtccggcaccaccagcagcagcttatagcctttcaatgccgccaccagcgccaaccccaggccggtattgccggcagtggcttcgatgatggtgccgcccggctgcagtttgccatcgcgctcggcctgctcgatcatcgacagcgccacgcggtctttgatcgaaccgccgggattttggttctccagcttgacgaacagccggcatgggccggtatcgaactgggtcagctccagcatcggggtattgccaatcatctcgatgacggaatgggggatcgccatgactcatctccaggattattcggtataaaagtcgttgtgcggatgatagcgctgaggataagcgctttaaaaagaacaaatagcggttctatatgccattatggaatatattaatcttttttggacgtatggatgcgcagatgtttagcggtgcagatgcttggccgtgtagccgtgggtagatgcgaaaatgcgcgtcgcgatgcttttttgaacgataagtgcgtgcctgcgtacagttatgtaaaaatgctgaaaattcacgctaaaccctgcaaaaataagataaatcacataaactcacagcaagggcattttcggtgcgttgcgttacccattacgggcgccgcaaggggttgcggccggcacgcgcgcaccgggccactctcgctggttggcttaaaacgtgaacatgtttgaaagttaacgctatttcaatggttttgaatggacactctggcgacgtcatgatgaaaaaaaacttatccacttccctgaaaaaactgaccttcagcgtaggcatcctgttgctggccgccccggccgtgcacgcggccgagccgccggcgccgccgcaggtagacgccaaggccttcattctgatggattacaacagcggtaaggtgctgaccgaaggcaatgccgatacgcgtctcgatcccgccagcctgaccaagatcatgtccagctacgtgatcggccaggcgatcaaggccggcaagatcaagccggaagacatggtcaccgtcggcaaagacgcctgggcgcccggtaacccggcgctgcgcggctcttcgctgatgttcatcaagccgggcgatcaggtgccggtgctggaactgaataagggcatcgtgatccagtccggcaacgacgccagcatcgcgctggcggactacgtggcgggcagccaggattcgttcgttggcctgatgaacaactacgccaaatctctggggctgcagaatacccacttcctgacggtgcatggtctggatgcggaagggcagtacagcaccgcgcgcgacatggcgctgctgagccaggcgttgatccgcgacgtgccggacgaatacgcgctgcataaagagaaagagttcacctttaacaagatccgccagattaaccgcaaccgtctgctgtggagcagcaacctgaacgtcgacggcatcaagaccggttacaccagcggcgccggccacaacctggtggcgtccgccaccgacggcccgatgcgtctgatctcggtggttttaggcgcgccgagcgatcgcgtgcgctttagcgaaagcgaaaagctgctgacctggggcttccgcttctatgaaaccgcgacgccgatcaaggccgataagccgttcgtcacccagaaagtgtggttcggcgacgtcagcgaagtgccgctcggcgtggcgaaagacgcctcggtcaccattccgaaagggcagatgaaaaacctgaaggccagctacaagctgacccaaccgacgctggaagcgccgctggcgaaaaaccaggtggtcggcaccatcgatttccagctggacggcaaaaccatcgagcagcacccgctggtggcgatgcaagaggtaaaagagggcaacttcttcagccgcatctgggatatggtgatgatgaagctgagccagtggttcggcgggatcttcggctgaatgccctgacaccgctgccgcatcgtcgcgtgcggttcctgaaaaagccgcaaccttccgttgcggctttttcattttcagcatccgtggcgtttcagaaatagtccaccagcatggtggctccgctggagaagtcaccttccgccagggtgacggcgctgtttttcaccggcaccgcatcaagcgtcggcggattggcgtaatcgatgttcagcggcgtattgatggcgaaagccttgccgttggccagcagtttgatgcccagcccattgacgctgctgttcaacacgctgctgtcaaaggccgccgcgctgcccatgatcttcattttcagctggcggctgttatccagaaactcacacttgatgctgtaatcgatgcgttgcatatagcgattaccgtcgatacgtttgatgccgaccttgccaaagtcgatatcgatggtgcgcccgtcgttgatcacgcaaggcggaggcgccaccacggtggcggtgatactgaccttggtgccctggtcggcggcctggggggcggcgctgatcacacccagcgtaaacagcagagcgcaacgcgttttcctcgtcatgttcattctggctcccgtctcaaggtgcgctgaagatcagcgtggccgagcctgacatcggaccggtggcgatgctggtgtaaggcacattgttcttcactggcacaaaggtgacggtgtcgttgcccagcccgttgacgatgcgcgttctgaacgtattgttgggtttcaccaccgcgccattgtgcaccatggctacgccgacattaggattggaggtcttgatgaaatcgctggagaagccgctggcatcgctgaccatgcgaaccaaaatgtcttgtgtcgcgctctgatcgtcacaccggtagctgagcgccttgtcctgtttgatttgggcgtcgatggcgctctgcgtgagaaagtcctggcggatctgaccgaagtcgacgttaatctgctggccgttgttgatagtgcaactggtggtgacgaagtaggcgtcgttgtcggcgatcaggcgccaccggtaaggcccacattttgggcaacctgactggtcatttttttgttcaaagttgatttggccgatgacgtcgcccttgttcaccttgatatcctgcgtcggcgaacggttgagcacgatgtaaaccctgatggaaatgctggcactgtttaggccggtaatcgtcatcacctggatacctgattggatcggggataagtagtcggtgccgttgattgtcataccgttggcaagcgtaccgaaaatggcggtgttcatcgtcaacgccgggctgccggtgagtaaaatatctttccagttggcgacgtcgtttttacaggtcacctggctgacgttgacgatttcatttttcccgatggacaattcagggcctatctttaccctgacgtcgaccggcgtcattgaaccaccctgaccaatgttcccgccgtcggaggttttacaggtaaatgcattggcgttaccaatgaggacgaaaaaagataatgccaggcagtgttgtaaaaataggatggttgtttttctcacaataatatcccgattatatagtgtcatttggctaggtgccgccacgaaatagggctaattaggctgactgtgccggcgttattccgttaaatgagaataaggcgcatctattcctggtatttccttgttgtcagctggcagtagggcggtggggtaccacctcaacgagttgttgatggagccgtccgttacgagcacttcttgtttggcgacgagttccaacagcagtagccgggcgcggtaaacgccgacgttgacggcgttggccagttgccgggtagacaaccacagatgctgaggtggcagtccggtgtcgggacattgacggggcgactgcgcgaataatgtttgcagcagatcgtgctgcaattgccgtatttccttttgttttggagataacgcttccatagcacttcctctgtatttcgattgctgtattcctaagaaaaaacaaagtttcactgcctaccaataacgaggtaaatcgcgaatcaagaaaaatcctatctatttatcaggattgaaaaaaaggggtttcccactccgtttctacctgttttcaggctgggggagtgtcacgcagaaacctaaagttttggtttattatattcacaaatggcggctttgcgatctgattaattgtgaaacagagaaaaacaggatattgcactataaaagtattttttacgatctatgagcctaaaaataacactaaattaactttaattaggaaataaattgcgaatgttcgtcttgatcaaaaaaagactttttttgctggtgggcatttgccagaatattcaccgccagacaagaagggcggattagaaagtattggtctctgcttgttgtgatttcgtttatttttatatgacgaattcattaatgggtagaccgctgcagacttgccgttatcgacgtatctattgtcggtttctttggttttggcagttaaccaaccagcaagatgctaaagaatcagggctgcgcatatataagcgcgagcagatttcctgttgctctttttcttgattggaatatgcattttttcttataaggaatataggttctatgaaacttaacaaaatcatgatggctgcagtgattgcatttggcgcaagttcttttgcacaggcagccgatcagggacacggtaaagtgaccttcacgggttctattattgatgcgccatgctctattgcacccgagtcgatcgatcagaccgtagatctgggccaggtttctaacgtggcgttgaaaaacggcggcaaatccaacccgcgtccgtttgaaatcaagctggagcagtgtgataccactacgctgaaaaccgttaaaaccaccttcagcggcattgcgtcgtcaaccaacaaagatctgttgggtatcgcggggaccgccagcggcgccggcgtagcaatcacttatggcggccagccgatcaaactgggtcaggcgactgcggcacagacgctgaatactggcaacaacagcctgaacttcgccgcttacctgcagggtgaaggcgcctccgcagccatcgttccgggcgatttcaccgccgtagccgacttcactctggcttatcagtaagtgagaccgcaggcttaatcaaccaggcatggggcacgccgcatgcctggtgactctctgtgtcaaaggaatgtcgcgatgtttttttcaaggaatcgggcgagtgccgttcttttggcgtcgttggcgtttgcgcccggcagtgcaatttccgccgcacaggggtggggcaaagtcagtatgcacggcgccattatcgacactgcctgcgccattgccgccggcagccgcgatcagacaatcgatatggacacgcttcctatcggacagatcattcgtgacggccagggaatgactaaacctttcagtattgaattggttaattgcattttggaacgtccggaaaacaagcctgattggaaattctttcaggtcacgtttgatggtttggcggaaggcgctttgtttggcgtacagggcgatgcgcgcggcatcgcattgaagataaaagacagccgcggcaggccggttattccaggggagccgttgccgatggagggaataataccgggcaaccgagtgctgaattattccatgacgttaatgccgaatcaccagccgttgaaggtgggagcgtatttttccacagtgcgttttaagctggattatttttgattttttttcgtactgacggttaattcgttattgaaaggactttattatgctttcaccggcagggaagttatttcgtcttcaggccttggggctctgtgtcgccctttctctgggaaatccgatcgcgttggtttatgccgccgacgttattcaattcaatactgatgtcttggacatcaacgatcgtaaaaatatcgatctgagccaattcacacgcagcggctacatcatgccgggcgtttataccatggtggtgcacgtcaataagaacgatctggcggaacagccggtgacgtttatggcgcccgagaacgatcctaaaggcagcgaagcctgtctttcgccggagttggtcaaccaactggggctgaaagaaaaactgttaagtacgctgaactggacgcacggcggccgttgccttgacgcctccagcctggcagggatggaagcccgcggcgatcttgccagctcctcgctgtacctcaacattcctcaggcctatctggaatacagctcggaaaactgggacccgccttcgcgctgggatgacggtattcccgggctgctgtttgactataacgtcaatgctcaaacgcaaaaacatcagaaaggcggcagcagttacagcctgagcggcaacggcaccggcggcgccaatctgggcgcctggcgtctacgcgccgactggcaggctaatctcagccatcagaccggttcttctcagtcgaccgacaaacagttcgactggagccgctattacgcctaccgggctattccggcgctgcgctcgcggctgacgatgggggaggattatctgaactccgacattttcgacagcctgcgctttaccggcgtcagtctgcgatccgacgacagcatgttgccgcccaacctgcgcggctatgcgccggaagtgacgggcgtggcgaaaaccaacgccaaggtggtggtcagccaacaggggcgcgtgctgtatgagacgcaggtggcggcggggccattccgcattcaggacatcaacgacgcggtttccggcgagctggacgtacgcgtcgaagagcaagacggcagcgtgcagacgttcaagatgaataccgccaacatcccttatctgacgcgaccgggtacggtgcgttacaagctggcgacgggcaagccgtcggagtgggggcatcacctgcgcgggccgatgttcggcaccggtgagttctcctggggcatcagcaacggctggtcgctgtacggcgggggcatcgccggcggcgattacaacgcgctgtcgctggggatcgggcgcgatctgatggcgctgggggcgttgtcgttcgatgccacgcagtcgtgtgcgcgcttgccgcaggagggcgctctgaccggcggttcataccggttgagctattcgaagaacttcgaccagtacgacagccagatcaccttcgccggctaccgcttctcccaggaggacttcatgagcatgggggactacctcgatgcgcgttacgaagggggacgcagcggcaagagcaaggagatgtacaccatcaccttcaacaaacagttccgcgatctggggctcagcacctatctcaactacagccaccaaacctattgggatcgggcgccgaacgatcgttacaacctgatggtatcgcgctacttcgatatcggcgatttcaagaacgtcagcgtatcgctgtcggcctatcgcaaccgttacaacgagcgcaatgacgacgggatgtacctgtcgctgtcgctgccctggggcagcgccgggacgctcagttacaacatgacgctcgatcgcgaagagaacgcccatcgggtcggttactacaaccgggtcgatgaacacaacaactatcagatcagcgccggcgccgcacgcagcggggcgacggccagcggctattacagccatcagggcgatatggcgcagatcaacgccaatgccagctaccaggccggccgttacagcgccgtcggcatcggcgcgcagggcggcctgacgatggcggcggaaggggcggtgctgcaccgggtcaatacgccgggcggcacgcgcttgctgctggataccgaaggtgtcgccggcgtgccggtgcgcggctacggcagtacggtgctgaccaaccgttacggcaaagcggtggtggcggatgtaaacagctactaccgcaataaggccagcatcgatctcaatagcctgagcgacaacgtcgaggcgacgcgttccgtggtgcaggccacgttgaccgagggggccatcggctaccgcaagtttgaggtgatagccggcgagaaggcgatggcgatcgtcaaactggcggacggcagcgagccgccgttcggcgccacggtgctgaatgcccgcaaacaggagaccggcatcatcaatgacggcggcagcgtttacctgtccggcctcaaccccggcgagcgcatgcgcgtgcattggaacggcgcggcgcagtgtgaaatccagttgccggcgccgctgccggccgaaatgctgatgaacacgctgctgctgccttgccgtccttttgccggcaacaagccagcggctgacgccaactgacttacacccggcggagtgcgctccgccgctaaaccgccggggcgggattgcccgccttcggccgactggaaccgtgaagacatgatgaatctgactatgaccagaaagaccgtttcccttgtgggcccgctcgccgccgcattgacgctcggcgcggtcggcctgcccgctcatgcggctatcgcgctggatcgcacgcgcgtgattttcgacggcgacctgaaaacggtcagtctcaacatcagtaaccagaacaaacagttgccgtatttggcgcagggatggatcgaagacgatcgcggcaacaagatccaaagccccttcaccgtgctgccgccggtgcagcgggtggagccgggcaaaccgagccaggtgaagatccagtcgctgccggccgcgcgtcagctgccgcaggaccgggagacgctgtattacttcaacctgcgggaaataccgccgcggagcaataagccgaacacgctgcagatagcgttgcagacccgcatcaaaatgttttatcgcccggcggcgctcgccccgaagaagaacgcggcgccgtggcaggagcagctgacgctgacccggcagggtgacaagtatgtggtgaacaacccgaccccttattacgtgacgatcgttgaggcgagcgccggcaagggcggcaaaggggcggccggctttgaaccgttgatggtggcgccgaaggccagcgccccgctgaacgtgcccgccgcgagcctcggcaacggtccgtcgctggcgtacatcaacgattacggcgggcggccgcagttgaacttccgctgcgccggcagtgcctgccaggtcgtgccggtcgccaaatgacgagccgcgcgcaagcagggaagaccgagtcatgaacacagcggagtgaacgaatcatgcaacgaaagatccccatgctgttgggaaaggcctatgaacgtcatcagcgacgcactatcggcctgacggtgttggccgcgctgatggtgccgctgacggcgggcacgatgctgatgctgatgccgccggcccgcgcggtggacaactgggacgtggagggggcgaacggcacgctccacgtctacggcgcgttgacggaaagcgcctgcagcctggaaatgaccaccgctcgtcaggaagtgtggttgggtgagacgggaacggcgcacttccagcgcccgggcgatcgcggcacgccggtggcgttcgagctgacgctgaaagactgcctgcgggcgccggcgagcagccgcgacgcctggactggggtgctggcctggagcggcagccagcctgcggtgtccgtggcgtttgccgcgccgacggatgacgacgcgccggggttggtcagggttgccggcgtcaccgggttggggttgcagctggcggatgccagcggcctgccggtgcgcctcggcgcgcgtaacaaaccggtattgctgacgccgggacaaaacaccctgacgtatacggtgacgccggtgcgcaccccggcgacgctgagcgccggcgcttaccgtgcggcgatcgatttccggctttactacgactaatacgccgcttgcgcccggtcggcgcaagcacaaccaaagggagtggcgtcatgcgcgcgacagagacgaaccggcgccggagcgcgctgttgggggctggcatggtcatggcggccggcataatggcgcagtcggcggccgcagcggaaaacatgcgctttcacggcacgctggtggctgagccgtgcgtcattcagccgggagatgaggatatccaactggatttcggcaccatcgtcgacaaatacctgtatctgaacacccgttcccacagtcaaaccttcgcgttgcacctgaccgagtgcgatctcagcctgggcaatacggtggctatcacgtttaccggcaccgagaacgccaaactgcccggcctgttggcactggatgccggcagcctggcgtcggggatcggcatcgggctggaagacagcagcggcaaggcgctgccgctcaatcgcgccagcgataaattccgcctgagtgccggcaacaccacgcttacgctgcaggcctatgtgcaaggggaaccggaggctatccagacgaagtccatcggccgcggcaccttcagcgcggtggccacttttacgttggaatacgaataagcgtctacaaggacaagaaacgcaatgatgagaaagcacatcaatcacgccctgcgcatggggctgctgtgcctgttggcgttgagcgccgccgcttgccaaagccaaaagtcgggcaagcccgccgtgaacactaaaaatcaggttgtgcaacctccgtcagaagaggctttgcgcaagcagcgtgaggccgaacagctgcagcagtgcctgcagcaactgggcgcattgcgcgcgatcgacgagaaacagtatcagcgctataaacgggccttcgacagcctgatgagcggcgcttcgcagtacgccagcctgcgcgcccgggtaaacggcgacacgcaggagacggtggatgcgctgtatcgctacaaggtcaactatctgtgcgccggggtgaatcaggcggtgttgaccggcttggcggatcgtggggagcagattaaatgaggctgtgcctgctgggctgcgtcgctctgctgttctccggcgtcgcgcttgcggacgacggcgtgccggcgctgctgcagtttgccgagcagtatcaacggcaaaacgtcgtgccgacgaacgaaaaagcggcgccagtcgaccgcgagtcggggcaaaaaaagcgtgaacccgcgaagcgcccgtcggacaacaataagccagcctcaccggccaaagcttttacgctgacccaggaattattggcgcgtgaccaacagctggcgcgccagcgaatggaactgacgatgttgcgccaggaactcgccgcgctacgggcggagaaagcgacgccatccgtcgcgacgttgcccgactcgtcaacgctgcaaaagtggatcgccgggttgggcgccgcctggcgcggctcgcccgacgcgcagcgcgccgaggcgttgctgcgtcaggcgacgcaggaaaccgcccaaagcagagcgacggcggcgcaggccgaacggcgcgtcaccgaacttgagtctgccgcgcaggcatcggcacagacgcttgcacaacgccaacgcgagcaccaggaggcgttgcacgctctgcgcgccgcgttggaagaaagcgagcagaagcgggccggtgagcagaaggcgactcagcaggcgcgcgaagacctgctggcgttgcgtaagcggctgcaatgggagatgacgccggagcagttgaaggatgatcgcaagcgtctgtcctatgcggcgggcagtgcgctggggcgggacattcagggggtagtggcggagcgtcaaagttggggcgtgccggtggatcgcgacagcctgttggcgggcgtcatcgatagcgtctcggggcgtttgcggttgccgccggatgaactgaatgcgctgacggcgcaagcggatgccaacgccgtggccgcgcgtgagaaacgcgttaacgaacagcggcggcgtgatgaagattacctgacgcagttcagtcaacaaaaggacgtaaagcaatcggcgatgggcttctggtatcgggtggattacgccggggagggcgcgctggcgccaacgacggtggttgatgtggtcgtgaaggagacgttgaccgacggtacggtgatccaggatatggaactgagcggcaaggtgctgtcgcaaccgttgtccgagtatccgccgctgtttcgggaggcgataagccacctgcacaaccacggatcgctgacgatggtcgtgccgccagcgctggcctacggcgaaaccggctatccgccgaaagtgccacccaacgccaccatgatttatgaattacgcatcgacaacagtcaggcgccgacaaagggtgcccaggcggttaaacgggaagccggaacggcggggaggcagggatgaacacgatgataaaaatcgcgctatttgatgaaaaccgttacttcagcgccggttggcaggaggccctggcgctgcacttcagcacttatggcaagcgcacgctgttactggatgcgcagcaggttcacgaagccgatctggtgttctgctattttccccccggcgtgcaaagctgtttttgtcacttctttgaggcgcagaccgcagggcgcaaaacgctgtatttctcgttgcgaatgccggaggggcggcataaacgcaccgtcggtaaccgctgcgcgctggaggccggcgtcatctaccacgatatgccgttggtttcggcgctgtatcaggtgagtgccgagctggagcggcgcagcaaatggccgaaccggccgggttgtggcaggaactgcatatgccagcaccgcggcctgacgctgcgcgaacaggagatcatgcgctgtatgacgcgcgagatgggggtgacgcaaatcgcccggatgctggacatcagcgtgaaaaccgtcagcaaccacaagatgagcgtgatgcgcaaaatgggattccggcgtaatgccgaactttacggttggctgcggcacagcgctcgtcccggggctgtgggggggcgagccggcattcaggtgggcgttgcggcagggaaagagcggcattgaaacggcgccggccaagtcagaccggccggcgcctttagtgcctcgccgtggcgatcagttacaggccacgaccttgatcgccagcccgccctgggaggtttcgcggtatttggcgttcatgtctttgccggtttcgtacatggtttcgatcaccttatccagacaaacccgcggctcgctggtgcggcgcatcgccatgcgcgcggcgttgactgccttgacggcggaaatggcgttgcgttcgatgcacggcacctgaacctggccggcgagcggatcgcaggtcagccccaaatggtgctccatggcgatctccgccgcgatacacacctgcgccgggctgccgcccagcagctcggtcaacccggccgccgccattgaacaggccacgcccacttccccctggcagcccacttcggcgccggagatcgaggcgttcatcttgtacagcgcaccaatcaccccggacgccaggaaatagcgggtgtaggagttggcattcaccgggcggatgaacttgtcgtagtaggccagcaccgcagggatgatgccgcaggcgccgttggtcggcgcggtgaccacgcggccaccggcggcgttctcttcgttgaccgccagcgcgaacatgttgatccaatcgaccacgttcatcgggtcgatattgttcttgtctccggtcaccagaatgcggcgcagcgcggcggcgcggcgcggcaccttcatcgggccgggcagcaagccttcggtgttgatgccgcgctcgataccggcgctcatcacctgccagacgtcggcgaagtgcgcgtcgatatccgctttgctgcgcagcgccagttcgttctgcatcaccaggccggacaacgacagcccggtctctttgcaatgctgctgcagatcgtgcgccgatttgaacgggtagggcactggcgtggcgccctcggtggattggccgaagtgctcttcgtcgacgatgaaaccgccgccgatcgagtaataggttttgctgtgcagcaagcgttcaccggcgaaggcgcggatgcgcatgccgttttcgtgcagcggcaggttgtcgctgtggaagttcatgccgccgtgcagcgggaaatccacctcgtgatggccgttggccagcggcaggcggccgcgctgttcgacgtcgcggataaagcccggaatgctgtcgatgtccacgtcgtgcggcaggttgccggccaggcccatgatgatggcgatgtcggtgtggtggcctttaccggtcaacgacagcgaaccgtacacgtcgaccaccacgcgggtagtgtcctgcagctgctggtgggcgatcagatcgtcgacgaactgtttgccggccttcatcgggccaacggtgtgggagctggatgggccgatgccaattttgaaaatatcgaaaacgctgaccatggtctcgcctccttcttcaggtttcaggcggtgaatacgggaaatgggggcagtgcgggagggccggcgcgcagcggcgccggccggacgtgattagccgagcaggctgaacacgatagcagagatggcgatcagacccatcacaaccacaaacacgttgctgatgtggccgctgtacttgcgcatggcaggcactttacggatggcgtacatcggcatcaggaacagcagcatggcgatgattgggccacccagggtttcgatcatgcccaggatgctcgggttcagggtggcgacgatccaggtggtcaccagcatgaagatagcggtcatgcggttcagcttggcggtgctgacggttttgccgcggctcttcatcgacttggcgaccaggccgttgaagccttcacgggcgcccaggtagtggcccaggaacgatttggtgatggcgacgaaggcgataaccggcgcgatgtactcgatcatcgggttgttaaagtggttagccaggtaagacagaatcgagatgttctgcgccttggcttccgccaggttttccggcgtcaggctcagcacgcagctgaacacgaagaacatcacggtcagcaccatcatgatgtgtgcgtaagccagaatgcgggagcatttcttctcggcgtctgcgccgtactcttcgcgtttggcgacggcgaaggcggagatgatcggcgagtggttgaaggagaacaccatcaccgggatcgccagccacagggtcatgatcaggccgtgacccatgccggtaccgctgccggacagcgacacgttttcgaagatggcgccggtccagttagggatcagatacaccgccagcagcatcagcactgcgacgaacgggaagaccaggatgctcatggttttcacgatggcctgctcaccgaagcgcacgatggtcatcaggccgacgatcaggatcagcgacagaatggcgcgcggcggcgatgtcatgcccaactggtgggtgatgaagctgtcgacggtgttggtgatcgccacgctgtaaaccaacagaatcgggtagatggcgaagaagtacagcagggtaatcagcttacctgcggtgatgccgaagtgctcttccaccacggcggtgatgtcttcaccgggatttttgccggacagaacgaaacggcacaggccgcggtgggcaaagaaggtcatcgggaaagcgatgatggccatgatgatcagaggaatcaaaccgccgatgccggcgttgatgggcaagaacaggacgcctgcgccgatggcggtgccgtacaggcccaacatccacatggtatccgttttacgccaggtactgctggagcccgaggccgcagaggcaattgtgccggtctgtgtagtgtccataaatatctccgaagtgaacacgaatttaaaattaaaaggcaaaacttaaggttaaaccgtcaaacgtcctattcaggcaacgcttgcggtaagaatcaggtgttgcttgcggggatgttttggcgtccccctggttgtttattgcgttcattaccaaggcacagcgccgggtaattcactaaagacttttcaccgtcgcggacgataaaagtcgttaccgctgccgacaggtctttgcctgtcgatttttgttggcggcaagataacgatttacagtagaaacaaccgtgatcctgctctcaaatgcgcaatatgtgcagttatcagcttttttatcgatttttcgcgcatttgttgcacatttgtgtaagattttgtgctgagaacgctctcatgaaagtttctgcgattatgcggcttgtacaataattagccggataaagcgctgtgctcagcagcaagccgagcaatatattttatgcgtggttttggatctagcgaaaaacccggattaagcagttttagtgatgtagatcacattatgtttttaaggtaaataacgtttatctttttgtttttattttgtttttgttgaaaaacaccgctagtaacgaagggaaattacttacgtggttagcggataaaaatgcgtaaccattcatcatataaataacagatagctaacaggtattggcgagatttgctgcaatcgcgtaaaccgccgtttatttaaacttcctggcctttggctcgatttatcatataaaagccataaatagccgttaattcacccaaccgaccgcgtggttagcctgcgaaaaaataatcacgcgggtgagctgttgcattttattaacctgatgttgcgtgcggataagcgaaaaacgcgaattgattgcgcattatttgttcattttttcggcggggaaagagggatatcgaagcggtgcgccgtcggttatgacggcgctgaaggcggactaatagcggatagcgatggcgttatcgttgaagaacgccatgaagtcggcgtccggctggcgatcggtgatcacccgatcgaactgcgtcagcgggccgatgcaggccggtttggttttgccgaacttgctgtggtctgccaccaggatcttttgctgcgccatcgccatggcgcgatgcttcatctccagctcgtcgaagttgaagcaggtggcgccgtgctgcaggctgaggccggcggcggagataaaggcgatgttcgggcagatgtgatcgagctcgttacggccgccgacgctggaaaagatgtagttgttcggcttgaactcgccgccgcacagcaccaccttgcagttcggtttgtcctgcagcgccaggaaggtgttcagcgaatgacacacggcggtgaaagccagctcgtcggtgatggcgtcgatgatcgccggcgtggtggtgccgcagtcgaaaaacaccgtgtcgttttcattgatcagcggcgccgccagcaggccgatgcgccgtttctccgttacctgtttggctttttgatcggaaacgaagtagttggtcacgccgttgctgcgcggatcggtcaccacgtagccgccgagcaacaccacggccgccggttcggcgctcagatcgcggcgaatggtcatctccgagacccccagcagcacggcggcttctttcaggtggatcttgtcagcgcgttttaacgcctgaactaaccggttgatacgttcttcgcgccgcgtttccatagatccgtcttcccacaggtagtagagataaaaggcgagccggcatttccggcgctaaacagaacgatgcggggcaatatcgggccgcatcaaccgcccgtattgtcccgcatcggagtgtattggctatgcccctcagggcatgccgacgatcagtagctgcccgctgccgcctgagcgccggagacgatggcgacgccggagctggtgccgatacgcgtggcgccggcgttgatcatcttctcggcggtggcgcgatcgcgcacggcgccggaagctttcacgcccatttcgctgcccacggtctcgcgcatcagtttgacgtgctcttcccgagcgccgccggtgctgaagccggtggaggttttcacgaaggcgacatcgagttcgcgacacatttcacaaacctggacgatctgcgcatcgctgagcaggcaggtttccaatattaccttcaacgggatcgccgcgcaaacctcgcgcacggcggcgatgtcggctttcacttcgtccagcaggccgctcttcagccagccgacgttgatcaccatgtcgatctcttgcgcgccggcggcgatcgccgctttggcttcaaaggctttggagacggtcaggccggcgcccagcgggaaaccgatcaccgagcagactttcaccgtgctttcctgcagcagctgggccgccagcggcacgtagccggagttgacgcataccgcatagaagttgtgctgctgcgcttcttcgcacagtttggcgatctgcatttcggtggcgtccatggccagcagggtgtggtcaacatagctggcgtaatcgatgttttcggtggtcatcgcggttccttagtgaagttgagaaaagagcatggatagataatgtgaaaataataacatttcaatgtcgataaacctagcgggatttgaaaaatgtcgacgagatcatagttacttcactgttatatgtataacttagaggagggttttttgttatttaaataacattttcagtggccgctcgcggcctgcgcgggcgaaacgtcgagggaaaaaagatgaagatcaacatcgacctggctcctgaagctttcgggacgtatcggcaggaactgttccgcaacgcggatttcgcggtgagcgcgcatcgctgcgcagaacgcgggccgatgctgacgctggcaaactgccgtggcgcgctgacggttttgccgtatcagggcctcgcgatctgggacgccgagtttgacggacattcgctgaaatcgggccgccgcagcgtgcggggcgccggaagaaagcgcgctgacgacgccgcgttctgtcccgcctggccgagccacgacggcgcgccgctccagatgcaacgcgtgtggctgcagctggcgggcgatgagctgacgttgcacggtgaaggcgagcggttgggcgggcgttggcgcatcggcccggcgctgcgtctggcggcccagagcgcgcagttcgccatagagatgaaggttaccaacctggccgatcggccgcagccgctgcgctatgtgtgccgcctcaactacgattgcattcccgacgcggtgttccgccagaacctgccgacgccggcgctgttgggagaggcgcttgggcaggaactgctgtgctccgacgatctgacgcgctacgtggatcaggccgagttctttatgctggcgccgcaaggccgccgctatgtgacgcgttttgccaccgggcaattcaactatggcctgcggcgcatcgctgtccagggcaacaggcggctgcttgcttttatccagccggcaaactgccggcctaacgcgccggaaggggaggcgggagtgatgctgggagcgggaaaaacgcgggcattttgcgtgaccaccggcgtggtgtgaaagcaggggcggtaacgcccctgtcatgttatgcggttattctttcacccagccgcggcgaatggcgaaggcaaacagaaagcgatacaggcgcgacagcctgtcggcgaggacatcgccgaacagattccataccagctgagcgaacaggcagccgaccaggccgagcaggaaaccgccgaccatatccagcggccagtgcacgccgaggtaaacgcgtgaccaggcgatgccgacggcgacaatcatcagcagcgcgccggaccagacccggtgccagaacaggaacgccagcgcaaaggtaaagatggcggtgccgtgatcgctggggaacgaactgtccggcacgtgcgccaggaaggtataacccacgccggcgacgaacgggcgctcatgcggcagcagcgcgccgatagcggaggcggcaagcatggcgaacagcagcgcgatcgtggttttcgccaccacttcgcgctgcgaaaccagctggctgcgcggcccccacagccacaggccgacgatcagcagcggcacgataatgataagatcgcgcgccagaaaggtggcgaaatcgatcatccattcgggagatgccggggtcgcattgatccaggcgaaaagaacatggtttaactgctccataaccgttacctcgtcttgcggcgccaatagccgctaactatccaataaatcgccaactggcttaaccaaacccaccaacctgcccacaggttatgggtaagaaaatgtgcgccgcgcatgatctgaccaaagcccatcaacatgccgagcgcaataccgccgcaccagcagcaccaggccaggcgcgggcgctgcggataaaacaggaaaaacaacgccatgaccgcgaaaccgctcgaggcgtgcccgccggggaaacagcgaccggggcccggcagcgccggtaccgcgccgaacaacgggaaggacatcgccttgccgccgtactcgatcagatcccacggacaggagtgcgcgctggtggccttgagaatgcccaccaccagcgggccgatgccgagaagcaacatgctgacaatcaggcgcgcgctgcggcgatagatgccccaaaacagcgtcagcaccgctcccacgatcactatctgcttcaacagacggtgattgatcagatccagccagtaattgttttgccacgggaaatgcccgctggcggcatcgtaccaatagttgctgatcgcccagtccagctgttcgttgcgggagagccacaggaacaccaaaccgctgatcagcaggccaaaaacttgccaacggtaaaaggatgtcggcagggagtaaagggcggttgtcttaatttgctgtgccgttgaggattgatttaatgacgattctggattcacgcgcaggctcggtgacagtattgaatagcgccactgtaataattctgtcttaagaaaaccttagtccgccggtaagaaaaccctatctgatacacctggttgtgcgcagatcatcacctgtttatctcgtcttaatcggcggttttttctggggtattgctccggctaacggggaatgccaggcgattgtcactatttatcgcctattgtaaagaagattaaacctgtggcgagcttggcggtagtgtattagtttatagacggattatttgacaaaaagtgtagggataaacatgaacaaggcatccgttgtattttccggcctgctgatggccgtttccgccagcgccatggcggccacctctggcgacgatgcggatatcagcaaacagccgctggaaaaggtcgcgccttacccgaaagccgagaagggcatgaaccgccaggtgatctacctgccgaagcaagagcacgaagagaactacaaggtagagctgctgatcggcaagacgctggaagtggactgcaaccgccatatgattggcggcaccctagagaccaaaaccctgtccggctggggctacgactacctggtgctggagaagctgtccgaaccggcctcgaccatgatggcctgcccggataacaccaagaccaagaaattcatcgccgccaacctgggcgacgccgcgatgcagcgttacaacagccgcctgccgatcgtggtgtatgcgccgaaagacgcggaagtgaaataccgcatctggaaagccgaagataccgtaagccaggctgaatcaaagtaatccgcgattagcgctgtgaatacatgatcttgtacaaaaccgtttgaagagcattttgcgatgatatgcggctcttcaggcggttttttattttcaggtaggaaagccgggtgcttagccaaattttttcaacctacagagggaaaaaggaaagtgactcaagctaacaaggttaacatccttggtttaagggcatttttttaattttcactcgcaatatcctcattttttatctcccttcatctctgattatattattttgaattgcaattatttcggtaataacaaaccgtttcggttacataaataaaaatattcttattaatcattttattgttgttttattgattttatttaatggcgaaggaatggaaattaattattgtgctgctagattcatcaatgtaattagctccacggcaattacattgttcgctaattaatatctaaaaaaacttacgaggatattccaatggctgattgtaaatgcaatgaacaagatccgcacgctcaaaatgaacatgttgctgattttactgcggttggattttcgcaaaaaacaccggcgccggtacctgtagaccttaagcagcagggcgtgttggcgcttaaactttcggtttgcgttggggccagttataaccctgcaaacaaccaaatttgttttaccattcctgtctacggtgacttttgcgtttcttcgccgattccaattcccattggtgggcagcttaaagtgtgcgcagagacctgtggttcctttattcctacgggattgaaggccactatttatctgaacggttccgttctgttctctgtcgttctttttggcgcttgctaatgtaaaaagaaaagcaaggcaccgtaggtgtcttgctttttttgatattaagatattgataaggccgttgttgagttcagccccacttgctaattaatacagttactccgctctcactccttctgaaatcaaaccttgggaagtcattgtctgatagccgaccgcccgacactaaacgttaagagaaacgatgtttcaggaaggagcggacgcggcgctgtacgtcgtcagttgaggtgttgctgccatctgatggtggtcccgcgggcggtggagtgcaggcaacaaaaaacccgataatcttgaacctaaaaggcgggattatcgggctccacaaaatggggacatcaaagaaaagcagtggcactaattcagactgcggcccccaacgaaagttctggccggcgacaaaaaaatcaaaatatttttatcgccgatccatctctcccgctaatcgatcagccgagtatgcccggccatagcactacgatgagcgaacccgccagcgttaacagcacgttagcgatggcgtaggtgccggcgtagcccaacgccgggatgttgctgcgcgcggtatcgctgataatttccatcgccggcgcgcaggtgcgggcgcccatgatggcgccgaacagcaaggcgcggttcatgcgcagcacgtaggcgccgaacaggaagcagataatcaccggcaccaggctgacgatcagcccggcgatcagcatctggccgccgaccgcgcccaggctgtggccgatgccggcgccggcgctcagacccacgcccgccataaacaccatcaggccgaactctttcaccatgttcagcgcgccctgcggaatgtagccgaaggtcgggtggttggcgcgcaggaagccgagcatgatgccggacatcagcagaccggcggcgttgccgatgccgaacgagaagttgctgaactgaatggtgatctggccgatcagcaggccgatgatgaagaaggcgcagaacgccagcagatcggtcacctggctgtggatcgagataaagccaatcttctccgccacgctcttcacccggcgtgcgtcgccgctcacctgcagcacgtcgcccttgttgagcacgatgctgtcgtcgatcggcatttcgatctggctgcggatcacgcggttgaggaagcaaccgtggtcggtcagcttcagctggctcaggcgtttgttcaccgcgttgctgttcttcactacgatctcttcggtcacgatgcgcatgtcgagcagatcgcggtcgaacacttccttaccgttgcggaagctcggatccagccgcgcgtgggcgtccggataaccgaccagcgagatctcgtcgcccacctgcagcaccgcgtcaccgtccgggttggccagaatgccgttgcggcggatgcgttcgatgtagcagccggtctggcggtagatgcccagttcgcgcaggttcttgccgtcggcccaggccaccagctcggggccgacgcggtaggcgcggatcaccggcaggtagaccttgcgctggctgtcggtgtccaggccgcgttcgcgagcgatttgctgggcggaggtggacagatcctggtgctgcagcttcggcaggtagcgcgcgccgaaaatcaggctgaccagaccgatcaggtaggtgagggcatagccgaggctcagatgatcctgcgccgccagcagcgccgggccgttgacgatggtgttgcgcagcgtatcgccggcccccaccagcaccggcgtggaggtcatcgaaccggccagcatgcctgcggtcaggccgatgtcccagtggaacagcttgccgagaccgatggcgatcaccatcgccgaaccgaccatcaccagcgccagcatcaggtaatttttgccgtcgcggaagaaaatcgagaaaaagttaggcccggcttccaccccgacgcagaaaataaacagcatgaagccgagattcagcgcctcggtgttaatggcgaagtgttgctggccgagcaacagggaaaccaccaaaacgccaatggaattaccgagttggacggagcccagacggagtttaccgaggcacagccccagtgcgagtaccacgaacagtaacagaatgtagttaccgtttaacaaactagcgacgtttatgttcacggaggataacttattgtttaccagtaagtgcttgatatagataactataagagataaattcagccttaaaacgacatcataaatcaccaccagcgtaaggcgaagcgaaccatcgttcggcggcgttcattctagacgctatgaccgatgacagccagcacagaaagctgatttcctgcgccgccgtgcgcatttaactctcttttgaccaaggaaaaaattcggttcagcgtcaccgcacgggtgaccgggccgatttctattgatgcggtaattgggcgggggagaattcgcatgacgagttatagatattggctgggcattctcagctgttttctgttgttcagcctggtgtttctcggccagcaaaccggcctgttcggcagcacggatcatgagcaccacggtgaaaccggcctgctgctgtttgtgatccccggcgcgatcgccagctatttgtcgagccgcaagcggctgctttgcccgttgcttggcgcgctgtatgcattgccgctgtgcctgctgatccgccacttctggctgacgccgtcctcgtcgttttggcaggaactggcttacgccaccagcgcggtgttctggtgcgtgttcggcgcgatgctgatgctgttcgccctcggtttgttgcacacgcttcagcagttgcaccggcggcagcggcaataaaaaaaggcgcattaagcgcctttttgccgttcaaaaacttactggaacaggttcaggtgttctttggcgtaagcttcgaaatcggtgcagccaccgatgtgcttctcatccaggaagatctgcggcacggtttcaaccggtttgccgacggttttttccagatcggccttggtgatgccttccgcgtggatgtcaacgtaacggaagttgaaatcgtcgcgttcttcagtcagtttttccgccagttctttagcgcggacacaataaggacagccaggacgcccgaagattactgcaaacatgcaacgctccttaattggattttcgataaattattcgcgattgcaacgacatcccgtcaccgaaaaagtcattacctgcgtcagatggcgcctactatgcccgttgaggcggtgaaaaaaaagcaggaattacctgttaatctgattcatgtaaccaattagtctgccggggctgtcgccgtcggcgggaattcactacactgggggcagaccttctggagaagaaaaatatgcgttcattcggtgacttaccgcgcccggtgctggtgttggaagggctgggtatcgtgatgctggtattggcctacctcagtattcacggccacctgcagctgccgggctggctggcgtcgcagcaggcggcggtcggcatgattttcctcggcgtggcgctgatggtgccggcggcggcgtttctggtatggcgcgtggtgcagggcttcgggccgctgatgcgcggcggcttgccgccggaaaacgatcgccgcaaaccgcaagatgcagacgcatcgaaagataatcaggatcgcgatccgcgcgcctgagcgccgcggccgctaacccgcctgccgggcaggcgttggcttttggggtgacgagtgaaaattgccattctttctcgcgacggatcgctctattcatgtaagcggctgcgtgaagcggcggaagatcgcgggcacagtatcgatatcatcgatccgctctcctgctatatgaacatcaatccggcggcgccgaccattcattatcgcggccgtcagctggaacgttacgatgcggtgatcccgcgcatcggctctgccatcaccttttacggcacggcggtgctgcgccagttcgagctgctcggcagctacccgctaaacgaatccgtggccattacccgcgcccgcgacaagctgcgttcgctgcagctgctggcgcggcagggcatcgatctgccgatcaccggttttgcccattcgccggacgacactggcgatctgatcgagctggtcggcggcgcgccgctggtggtcaaactggtggaaggcacgcagggcatcggcgtggtgctggcggaaacccggcaggcggcggaaagcgtgatcgacgcctttcgcgggctgaatgcccacatcctggtgcaggagtacgtgcgcgaggcgcaggggtgcgacgtgcgctgtctggtggtgggtggccgggtggtggccgccatcgaacggcaggccaagcccggcgagtttcgctccaacctgcatcgcggcggcaccgcccgcaaggtgaccatcaccgccagggagcgggcgatcgcggtgaaagcggcgagcacgctggggctggacgtcgccggggtggatatcctgcgcgcccagcgcggcccgctggtgatggaggtcaacgcctcaccggggctggaaggggtggaaaccactaccgggctggacatcgccggcatgatgattgaatacattgagcagcgcggccggccgggcttccgcctgaaatcgggcggttgacggggcgggcggtgcgcctttcccgccgtgcaatatctgaattagtgaattaagccgcattgatcgtggcgtatcgggtgaatattccgtaagctatgcgccttttcgcgtattgaatattgtgaggctggttattatggattcactcattgtccccgatttggcgctgttgcggcgctggctggatcagtcgggcatttctttctttgagtgcgattcctgccaggcactgcacctgccgcacatgcagaacttcgacggcgtgttcgacgccaagatagatctggtggacaacgtcattctgttctccgcgctggccgaggtgaaaccgaccgcgctgatcccgctggtggctgacctgagccagatcaacgccagctcgctgaccatcaaggcgtttgtcgacattcaggacgacaacctgccgaagctgatcgtctgccagtcgctgagcgtggcggtcggcatcacctacgagcagttcacccacttcatgcagcagggcgaagagcaggtctcgatggtgatcctcgaggcgcgggcgaacgatctgctgtttatgggggacgaagaagagatccccgctggcgccgtgcgtcagccgatgctgcactgatcctcgctgtaccttaagcatgccgtcgctccggcggcatgctgccgtgattcccctccgcaattaaatattctgcactttggcctctgtcgcccgatctttctcggcttttacgccgttaatgccgtatcacatagagaaaaattgcataaaaaatcgataaatggcgttttttaccctgggggctggcgggttgcgatggcagcggctatgctgctgattctgcaaagggcttgcgatttcccttgtaaccacgcgagcagggcagtgcaaaaaggcgcatgcaatcatatgcatagccattcatttcgcggttgcaacgattgcgctcaatcaggaaaggttttgtatcgctgcagatacaagttcaattctatgatttaccctgttttggaggaagttacggatggtcacccaacgtaaaaagtggttatcgggtgtggttgccggcctgttgatggccgcgtccgtcaatgcgtcagccgaagagaaaacgctgcacgtgtataactggtccgattatatcgcgccggacactttggctaatttccagaaagaaaccggcatcaaagtggtgtacgacgtctttgactccaacgaagtgttggaaggcaaactgatggcgggcagcaccggttatgatctggtggttccttcatccaacttcctcgaacgccagtcgcaggccggcatcttcgaaccgctcgacaagagcaaaatgcccaactacaagaatctcgatcccgagatgctgaagctggttgcacacaacgacaaagacaacaaatacggcatcccatacctgatggtgaccaccggcatcggctataacgtcgacaaggtgaaggcggcattgggcaaagacgcgcctgtcgacagttgggatctgatcctcaagccggaaaacctcgagaagctgaaaagctgcggcgtctccttcctcgatgcgccgagcgaggtttacgccaccgtgctgcactacctgggcaaggatcccaacagcaccaatgcggcggactacaccggcgcggccaacgatctgctgctgaaactgcggccgaacattcgttatttccactcttctcagtacatcaacgatctggctaacggtgatatctgtgtggcgatcggctggtccggcgacgtgatgcaggcggccaaccgcgccaaagaggcgaagaacggcgtgaacgtggcctacgcgatcccgaaagagggagcgctgacctactttgacatgttcgccatgccggcggacgccaagaacaaagacgccgcgtaccagttcctgaacttcctgatgaaacctgacgtgatggcgggcatcagcaactatgtctattacgccaatgcggtgaaagactccacgccgctggtgaacgccgaagtgcgcgagaacccgaacgtctatccgccggccgatctgcgcgccaagctgttcacgctcaacgtgcagtcgccgaagctggaccgtgtcattacccgcgcatggactaaagttaaaagcgggaagtgatgatgggggggatcccccccatcgtcggtaaaccgacaggcgggcgttccccgcctgcattgccgttttgggccacggcgctcgccgtggttttgtgccgctttacgccggagagcaccccgattgaacgacgccatccctcgtcctcaagccaagtcgcagaaggtcttcacccctctgctggaaatccgtaacctcaccaaaaccttcgacgggcagaatgcggtcgaagacgtcagcctcaccatctacaagggcgagatctttgcgctgcttggcccgtccggctgcggcaagtccaccttgctgcgcatgctggccggctttgaacagccgacggaagggcagatcgtgctcgacgggcaggatatgtcgcatgtgccgccgtaccagcggccgatcaacatgatgtttcagtcgtacgcgctgttcccgcacatgaccgtggagcaaaacatcgcgttcggcctgaagcaggacaaaatgccgcgggcggagatcgccgaacgggtggcggaaatgctggcgctggtgcacatgcaggagtacgccaaacgcaaaccgcaccagctttccggcggccagcggcagcgggtggcattggcacgcagcctggccaagcggccgaagttgctgctgctggatgaaccgatgggcgcgctggacaagaagctgcgcgatcgcatgcagctggaagtgaccgacattctcgagcgcgtcggcgtgacctgcgtgatggtgacgcacgatcaggaggaggcgatgaccatggcggggcgtatcgccatcatgaaccgcggcaagttcgtgcagatcggcgagccggaagagatctacgagcatccgaacagccgcttcagcgccgagtttatcggttcggtcaacgtcttcgactgcgtgctgcaagagcgccacgacgatgcgctgatcctgcaaagccccgggttgcgtcatgcgatcaaggtggatccggatgcctcggtggtggacggtgtgccgatccaggtggcgctgcggccggaaaagatcctgctgtgcgaacaagtgccggaagacggctgcaacttcgcggtgggggaagtggcgcacatttcctacctgggcgatctgtctatctaccacgtgaagctgcacagcgggcagattatcagcgcccagctgcaaaacggccatcgtttccgcaaggggatgcccacctggggcgatgaagtgcgtctgtgttgggaaaccgacagctgcgtcgtgttgacggtgtagtagagccggtgaggagtaacccgtatgaccctgctttctgaacgcgcgccggaaccgccggccaaagcgcctggtgccctcagggcgctgttccatcgcctgctgatggcccatggccgcaagctggtgatcgcgctgccgtatttatggctgacgctgctgtttatgctgccgttcctgatcgtgttcaagatcagcctggcagagttggcgatggcggtgccgccctacaccgagctgatgagctgggtggacggcaaactgaacatcgcgctcaacttcgccaactacctgcagctgaccgacgatccgttgtatatcgatgcctacctgcagtcgctgcgcgtggcggcggtctcgacgctgtgttgcctgatcatcggctatccgttggcctgggcggtggcgcacagcaaggcgtcgacccgcaacattctgctgttgctggtgatcctgccttcctggacttcgttcctgatccgcgtctacgcctggatggggatcctgaaaaacaacggcacgctgaataactttctgatgtggctaggggtgatcgatcaaccgctggtgatcttgcacaccaacctggcggtgtatatcggcatcgtttattcctatctgccgtttatggtgctgccgatttacacggcgctgatccggctggattactcgctggtggaggcgtcgctggatctgggcgcccggccgctgaaaaccttcttcagcgtgatcgtgccgctgacgcgcggcggcatcatcgccggttcgatgctggtgttcattccggcagtgggggagttcgtgatcccggaactgctcggtgggccggacagcatcatgatcggccgcgtgctgtggcaggagttcttcaataaccgcgactggccggtggcctcggcggtcgccaccatcatgctgctgttgctgatcgtgccaattttgtggttccacaaacaccagaacaaggaaataggggggcaggaatgaacaacttgccggtagtgcgttcaccgtggcgcatcgccatcctgactgtcggctttaccttcctgtatgcgccgatgctgatgctggtgatctactccttcaacagctccaagctggtgacggtgtgggccggctggtccacgcgctggtatagcgaactgttccacgattcggcgatgatcagcgcggtggggctcagcctgaccatcgccgccgcctccgccaccgccgcggtggtactgggggccatcgccgccgtggtgatggtgcgattcggccgctttcgcggttcaaccggcttcgcgtttatgctgaccgcgccgctggtgatgccggacgtgatcaccggcctgtcgctgctgctgctgttcgtggcgatggggcatgccttcggctggccgtcggaacgtggcatgttcactatctggctggcgcatgtcaccttctgtaccgcttatgtggcggtggtcatcagttcgcgtctgcgcgaggtggatcgctcgattgaagaggcggcaatggatctgggggcgccgccgctgaaggtgttcttcgtcatcaccttgccgatgattgcgccggcgctgatctccggctggatgctggcgttcaccctgtcgctggatgacctggtgatcgccagtttcgtctccggcccgggtgccaccacgctgccgatgctggtgttctccagcgtgcgcatgggggtgaacccggaaattaacgcgttggccagcctgatcctgctggtggtgggcatcctcggcctgatcgcctggtggtttatggcgcgctcggaaaaacaacgatcgcgtgaattgcagcgggcggcccgtagctgaatcgtaacaaacctgctatttttgcaatcaataagtattgcaactaactacctgactttacatgtgccacctgtataggtggcgcgtcgtagcggaacacggatatgtcagacatgctgaaaagcgggcagggaatgggatcgacttcggatgcgccggtgccggtgatggtggcgggcaccgccatggtggcgatcaagtgtatcagcgtggtgctgctgctgggtgagctgggcgtcgacggcgcgcaggagttcgtcaacaccagcgcgcaggcgtgggattccacctttatctttctggccggcctgatgctgctgtgcctgcaaatcagctgcggctttgcggtgatgcgcggccgcaattgggggcgctggggctatgtggtctgccagtgcatcgtggtgctttacctgctgctggccaccatcggcagcgtcttccccgaggtgttcaccgtggagggggaaaccagcggccaaatcctgcacgttctgatcctgcaaaagatccccgacgtggtgatcctggcgttgctgttcgttcctgccgccagccgccgcttcttcaccgcgcgcaagtgagattttaggcgcgcggagtggtaaactctgcgcccttaattcgtcatcctgaacttcacggtaatcttcatgcattgcgctttgtatacggcgggcacctgccgttcctgtcagtggctggaaaagccctatccgcagcaactggccgacaaacagcatcacctgcaatcgctgctggccgggcgcgacgtcgcgcagtggctgcagccggtggcgggggaactgagcgcatttcgcaataaagccaagatggtggtcagcggcagcgtggagcgaccgctgctcggcatgctgcaccgcgacggcacgccggtcgatctgagcgactgcccgctgtaccccgccggctttgcgccgatgtttgctgtgctgaaaagctttatcgcccgcgccggcctgacgccgtataacgtggcgcgcaaacgtggcgagctgaaatacctgctgctgaccgaaagcacgctcgacggcggcgtgatgctgcgtttcgtgctgcgctcggaaaccaaactggcacagctgcgcgccgcgctgccgtggctgcagcagcagctgccgcagctcagggtgatctccgccaatattcaaccggtgcatatggcgatcatggaaggggagcgcgagatcgcgctgaccgaacagcaggcgctggaggaacagttcaatcaggtgccgctgttcatccgcccgcaaagcttctttcagaccaacccgcaggtggccgccgatctgtatgccaccgcccgcgactgggtgcgcgcgctgggtatcgacagcatgtgggatctgttctgcggcgtcggcggtttcggcctgcactgcgcgcagccgcagacgcgcctgaccggcatcgaaatcagcgcggaggcgatcgcctgtgcgcgccagtcggcgcagcggttagggttgttgcaggtagattttcaagcgctcgattccacccgcttcgccaccgccgaaggccaggtgccgcagctggtgctggtcaatccgccgcggcgcggcatcggccaggcgctgtgcgactatttgagccggatggcgccggactatattctgtattcgagctgcaacgccgagagcatggcgaaagatatcgagatgttgccggggtatcgcatcgaacgggtgcagctgttcgacatgttcccgcatacctcgcactacgaagtgctgacgctgctggtgcggcgttaaaggcgctttttggcagccgtgtaagccgctgaacgttcgcgtttgcccacagacaggaccagaaccacgatctccgtttccatgacgcgatataccaaacgaaagcctgaggctctgagtttgattttgtagcaatcaggcaaaccggcgagtttgttggcggggatgtggggattaaccagcaccgatgccagcttttttttgaactgttcccggatcaccggggacagttttttaaattccttcagcgcatgttcttcgaattcaagcttataagtcatccaaattgaccttaatgcgtttgccgttcatccgtgaacgaacgatttcagcgagttcgatatcttccaggtactccgcgatcgcctcccaggtttccggagagacgtaatatcccgaaatcttaccgttggtcaggacggcgaccggttgcccttgtgcctctttaagggcggcgttgggcgatttcttaaaatcgctgatgctgactgccgagtcggcaagaatgggttgaaccgtcatgatgttatccttgatgctaaattcagtatcaaatttagcactaaccggatggggtggcaattagatggagccgccgaaggagggcgactccacacgcggacttactgcgggaaccacttgtcgttgatggctttgtaggtgccgtcggccttgatggcgtccagcgcggcgttcagcttggccagcagcgcctggttgtctgggcgcaccgcgatgccgagaccggtgccgaagtattgcgcatcggtgatgtgctcgcccaccggcgccagctgcgggttggttttcagccattcgttcaccacggcggtgtcgccgaacacgccgtcgatgcggccgtttttcagctccagaatggcgttctggtagctgtcgtaagaaacggtgttaatctccggatgcttgtcctgcatgtatttctggtgggtggtgccgttttccatgccgagctttttgcctttcagatccgccagcgagctgaacttgcctttttgcgcgatcacgatcgccgagttggcgtagtaaggctgggtgaaagcgacctgtttgctgcgctccggcgtgatatccatgccggaaatcaccgcatcgtatttcttgaatttcagcgcggcgatcaggctgtcgaacgcctggttggtgaaggtgcactgcgcctgcatttgcttgcacagcgcgttggccagatcgatatcgaagccgacgatctggttgttggcgtcgagcgattcgaacggtgggtaggtggcggaggcggcgaagcggatggtttcggccgcggtggcgttaaaggtcatcccggctaacatcgtcgcggcaagcagcagttttttcatgcgtagagctcctgtctggatcctgaaagtgattattcgctatcgtttgtttttactggtaatcgccagaggtttttgcgcgaatgcctgttgttaaccctgccattgagtgaattaaaatgcaatataaatgattaagtattgccttgaggataaaaaaagccccgcacaatggcggggctcatgggggcggcggcctcagttgcgacgctcaaacgccagcgcgcgacgctccaccaggcgcatcagcagcgtcagcaggccgttgacgcacaggtacaccaggccggcggcgccgaacaccatcacgtcgtaggtgcggccgtacatcagctggctgtagcccatcacttccatcagcgtgatggtataggccagcgaggtgcttttgaacaccagcaccacttcgttggagtaagacgacagcgcgcgcttgaaggcgaacggcagcagaatgcgcagcgtctgccggcgcgacatgccaagcgcttcgcacgattgccactgcccggcgggaatggcgcgcaccgcgccgtagaacaactgcgtggtgtaggccgcgctgttcagagccagcgctatcatcgcacacagccagggctgcgacagcaggttccacagccaagggtagtcgcggatcgccgggaactggccggggccgtagtagatcaggaagatctgcaccagcagcggcgtgccggtgaacagcgtcacataggccttgaccagcggcgtcaggatcggcgttttcagcgtcaggatcaccgtcagcagcagcgacagcaccagcgcgacgatcagcgcggcgacggtcagcgtcaggctggtgtgcaaccctttgaggatctccggcaaatattcaatcatcaggccggcccccgctcaaagcgcgtggcgcgcagttcaatgcgcttgatgacgtattggctgaacagcgtcaccagcaggtagatggccgccgcgatcacgtaccaggtaaaaggctcctgggtgcgggtggcgatgctcttggtttgcagcatcagatcgttcacgctaatcagcgacaccagcgcggtgtctttcagcagcaccagccactgattgccgaggccgggcagggcgtggcgccacatctgcggcatgatcaggcgaaagaagatcgccgctttgccgagacccagcgcctgaccggattcccactgcccctgcggcaccgctttgagcgcgccgcgcagcgtctgcgaggcgtaggcggaatagagcaaggccagggcgatcaccccgcacaggaacgggctgacttcgaaattgtcgatcgccaactgaatcggcagctggaacagaccgaggttgagggtaaagccgtcggagagcatcagcagcagctgcgacgagccgaaatagataaacagcaccaccaggatttccggcaggccgcgcaacacggtcacccaggcggtgccgagccagctgaccgctttccagcgggacgattcccatacggcgaacagcatcgccagaatcagaccgaggatcagggcgcaaacggcaaggccgacggtcatgccggcggcgcttgctaaaggttgtaattcattcatttgggcgtattactgctggaaccattttttgtagatggtttcataggtcccatcctgcttgatcttgtccagagcggcgttgaacttgccctgcagatcggtgttcttctggcgcaccgcgatgccaaggccggtaccgaagtagtctttgtcggtcactttggcgcccactgccgccagcgcgtcattctgcttcagccactcgttgaccaccgcggtatcgccgaacaccgcatcaacgcggccgttcttcagatccaaaatggcgttctggtagctgtcgtaaggcacggtggtgatttccgggtgcttgtcagtcaggtatttctggtgggtggtgccgttttgcacgccgactttcttgcctttcagcgccgccacgtcggcgattttgcctttctgcgcgatgaacagcgccgagttatcgtagtaaggcttggtgaacagcacctgcttctcacgctctggcgtaatgtccataccggccatcaccgcatcgaaacgcttgaacttcaggctcgggatcaggctgtcgaacgcctggttggtgaaggtacattcggcctgcatttctttgcacagcgcgttggccagatcgacatcaaaaccctgaatcttgttgccggcgtcaataaattcaaacggaggataggaggcttcggtagcgaaacggatggtttcggctgcggaggcggaaacgctgatgccggccagaacggcggcgattattagttttttcatcgcaaactccccaaattacagcaagttaattgttagtgtgataagtaattagcaaactcggtggtccgcggctgcgtgaagtggctgctgtcgccttgctccactacgtggccgttttccatgtacaccacgcggctggcggttttgcgcgccacttccacttcgtgggtgacgatcacctgcgtgatgccggtgccggccagttcgcgaatgatgctgacgatctgggcggtgatttccggatccagcgctgcggtcggttcatcgaacagcaacacctgcggctccatcatcagggcgcgggcgatcgccacgcgctgctgctggccaccggaaaggtgcagcgggaagcgatcggcgaagtcggtcaggcgcagacgcttgagcagcttgtcggcgcgctccatcgcctgagccttggtcagacccagcacgcggcaaggtgcctcgatcaggttctgaaccacggtgaggtgaggccacaggttgtattgctggaacaccatgccgacgttttggcgcagttcgcgaatggctttctcgcccggcgcctgcctgaagtcgaattggttgccggcgatctgcagttggcccgaacgcggcatttccagcaggttcagcacccgcagcaatgaacttttcccggcgccgcttgggccaagcagcaccagggtttccccggctggacattccagcgtgatgtcaaacagcgcctggtgagcgccgtaatagcaattgataccgttaagttgaatactcatgcgccagaattgaatagacattgatgccgcaaatgttaacttccacagaatacttatgcaatctttgtgcgttaaaatttatgagtgtgcggcgggacagtaaaagattagcacaagataccgcgactcaagccgagggaggggatttgtggcgcaggctgtgagatcggtagcgaaattttttctattggacgaaattcgagcggtagacgggcggcgggatgaccgacgcggcaagcccgcgtcggccgggggaagcgggttactggttttccagcacctggcgtacgctgccgttggtggcgtgcgctggaacattcaggtagcgaatatcatcaaccacccagcaggtgccttcgcgcaccatcagcacttcgtcctgccagttcacggtgctgttggcgtctttctggtagctcaggtcaacgcgcagcgggatgttcttcgcatcggtgttaggaatggtcgaggcgctggcgacggatgcgctgcttggcccctgcgcattgccggagaacagatcgccggtaatctgatgcttgcccgggttttgagcggtgctgaccagatcctgatacagcactttgctcagataaggctgcagctgcgccaggcggttgctgtccggcaggccggcgccctgctggatgcgcaggtcatagaacttttgcgcgaccgtatccgggccgccttccacacagctgccgctgcgggtgccgatatccttgtatgccggttccaccgtggtacaggcactcagcaacagcgctaagggtaaaacagccgcaatcgtttttgttttcatcttattaccttatgtgaaagtctctaccatgaagaccgatagcttacagtataaatgcgttttttggccttgcattcgtactgcgtgccattgattaagcgaacataatgtcaatcttctggtcatagatacgttgaattaatcaaacaaggagttctgatgcagctttcaactaccccgaccctggaagggtttaccatcaccgaatactgcggcgtcgtcaccggcgaagcgattctcggcgccaacatttttcgtgatttcttcgccggcgtgcgcgatatcgtcggcggccgttcgggcgcttacgagaaagagctgcgcaaggcgcgactgatcgcgttcgaagagctggaagaccaggcgaaagagctgggcgccaacgcggtggtgggtattgatatcgattatgaaaccgttggcaaagacggcagcatgctgatggtgaccgtcagcggcaccgcggtgaaagtgagccgctaacgccatgctttcttttcgccccggccattccgccggggcgacatcctcttgatttatcccaccttgtgctgctcgacgattgggcggtgttcctgcggcttcgtgggcaccggctcctggcgatgcggcatcggctgaacggacgtctgatggagctgcggcgccggggccgcatgcggcatgatgcgctgttgcggcgccggcattgggcttatcgccgccggatgctgcggcgctgccggttcgcggatcaccggctgagcgacgtgcggagccggctgaatctgcgggcgcgcgacggctggatgcatcgccgcagcggccggcatcggatgcgtctgcagcggcgctgaatgtacggctgtcggctgctgtgggtgaggcgccgtcggaacggcatgcgtgaacgtcggcgtgctcatcggctgctgtgcatggggcgcgatgaccggttgttgcacgtatggggcggccgctaccggcgggggtacggttatcggctggtgtacgtgaggcgccaccggctgagtatgcgcaaagttcggcatggtcatcggcgcgtgggccgcaggcgcgacgcgcggcagttgcggcgcagcgttaggcaccggttggctgaaacgcggcgccggcgcggcggcggtattgtagttgttcaccgtgctggtgctgctgcgattcacagtgttcacgttgttatattggttgatgttagtgacgcgattcaccacggtggtggaatgcgatacgtaaggcgcattgcggtagaccaccggctggcgccgatcgtcccagcgcatatcccagttgtgccagccgctgttgtgttggttgagcaaagaggccaccgcgatgccgacgccgaagctgatcacgccggccgccagcatgtcgccgccgctgtagcccgagggctgatactgatagctcggataggcctggatcggcgtgccgtaggcctcccagggatcgtaatgcggaacgtaaaccgtatccggctggctgggttcgataacgatggtcccgcccggcgccgccaccacgcgctggcgatagggctgctgttcgacataacgcgtcgtcggcgccacgacgatgcgctgctgcggggtgtttttcagcgtgccctggctggccgcccgttgacgcatcacctgaatggcgttcatcacgtcggtgggatcgttcaggtaggcgctgcccagggtggtggtccaggggatgtttttcgccatttgatcgagcacgtcggggaattgcaccaggccgcgcacgctgggatcccagggctgagcgtcggccgccgagctgagcgccgccggttgcaagccgcggttttgcgccagccaggcatccgcggcgctgatttggtcaggatagcccgcgccggccaacacctgcgccagcagcttgtcggggaacagcgccaccgggctgaccaactggtacagttgatcggcgctcagcggcgtataggccggcgcgctggcactcgtgacgggcgcggccgagggcggggcgctcccgcccatcgcatcggcgactttttgccgatcgcagccgctgagcggcagcatgacggcacagagcaaccaggacagatagcgtggcgtgaacatgttcgactccgctctttcagcgcagatgatactttgagactatcatgggcgggaaaggccgccagccgggagcaacactcgcttgcacatcggcgctctctgtcattatttctcgatgagcgtgatgattggatacagatcaatcgcgtcgcgttacatctttcacggacgtcaatcaggaggataagtgaaaatttggccagggatcatcgccgccgcgctgttggcgggatgccaaaatccgcagcagaacacgctcgtcgatcgtggcgcttaccagctcgaaaccttgcatcaggcgcagggcgccgatcagcgtattcggtttctggtgatgcactatacggcggaagactttcattcatcactgaaaacgctgaccgatgaacacgtcagcgcacactacctgttgccggcgcacccgcagcgcgaacacggcaaaccgacggtgtaccggctggtgccggaagcgatgcgcgcctggcatgccggtgccagcgcctggcgcggccgcagcaatctcaacgacacctcgatcggcattgaaatcgtcaacaaggggttcacccgcagcatgctgttcacccattggcagccttatacggcggagcagatcgccgtgctgattccgctgagccgcgacatcatccaacgctatggcatccagccgcaggacgtggtggggcacagcgacatcgcaccgcagcgcaaacaggatcccggcccgctgttcccctggcgacaactggcgcaggccggcatcggcgcctggccggacgaggcagacgtgcagcgtttgctggcggggcgcgatcgtcatgcgccggtgccgctggcgccgctgcttgataagctggcgcgttacggctacgcggttgattcgtcatgggatgcgcggcagcagcgcaatgtgctggcggcgtttcagatgcatttccggcccgacgatgttcgcggtgaaccggatgcagagagtgaggcgattatcgatgcgctgctgttgaagtacggcgcgtggcgttgattacaggccgtgcagtttgccgtgatctttcagccagcgggcggtgcgcgcgatgccttcttccagcgagacgatcggctgatagcccagctcttgctgcgcgcgggtggtatcgagcgtgaggtcgaagttgagtttggcgacgccgtaatgggtcagcaccggctccttttcgcttttgctgcccaggcgctccatgccgcgcgccatcatgtcgagcatcggataggggacggagcggatgcggcacttcatgcccaaatcgtcgatcagttgctgcaccacggtgcgcagcgggcgcggctgctggttggtgatgttgtaggcgcggccggacggcgtgtcttcttttagcgtcgccagccacatggcgtgcaccgcattctccaggtaagtcatgtccaccatcgccgcgccgccgcgcggcagcagcaggttgccgtagcgtttgatcatctgcagcagccgcggcagcatcaccttgtcgtgcggcccgaacaatccctgcgggcgcagaatggtgaaatgggtctgcggattggacagcgccagttgctggatcacctgctcgccggcggctttgctgcgcgcgaattcgttggcgtagcgctgcgggcgaaagtcttcggtcacgttgcggtgatggtggtagtcgaaatagatcgccggggaggagatgtgaatgaactgcgccacgccataggccgccgcccattcaccaaggcggcgagtggcgcggacgttggccagttcgaaggcttcttcggtgccccagggcgaggtaaagctggagcagtgccacagcacatcgacgtccgccagcatcgctttggcctgcgaagagatcaggttggtgagatcggcatgaatgaactcagcgcccattttttccagcaggccgcccatcgcctggttgcggccggtggcgcgcactttgatgccctggcggcgcagatattcaacggcgttacggcctaacccactggtggcaccggtgaccaataccttcataacggactctattctcacccaaaatcggaataccggcgggcgcttgcggcgctcccagcaaataagatgccattcttccgtgatttcgtgcgctatgcaatcggaaagccccgaagcacagcggcaaactgtgcggttgatcgacaaatgagcgccgttcagcgctgttggcggtccagattctcggcaagctcggcgatgcgcttcgccatgccgcgaaaaataaacagatgcgcgggcatcatggcgaaccaatacagcagcccgctgaagccggccgggtgccaccaggcgcgcacgtccagcgtgcggcgatcgccgcgatcggtgatggtgaagctcagccgccccaggccgggcgccttcatgccgaacagcagcgccagctgccgcagcggcttcagcgtgatgactttccagccgtcgatctcgtcgcccagcgccagggccgcgcgcgccgggcggccatagaccacgccgttgccgatcatgtcgtccatgcgggcgcggatccgccacaggatattggcgtagaaatagccttcctcgccccccagctgctgcaccgtttgccacagggcctggctggaggcggcggtgtcgagcgaacatcccgcctgtttcgggtaatagccgtagccggggcgccagcgggcccgcgccgccggatcgtagccccagtcggcggaatcgaccacctccagttcgcgctgcagcgtggcggtgaccgcctgatcgaaggtgtgcagacgttgcgggatcagggcctgcaacggtttgccgtcggcgggcagatcgtgcttcaggccctggatcagcgcgcgcgcgatcggcgtcggcaccgaggtgatcaggctgatgaaccacactgaaatcagccgcgtcggcagggggatcgggatcagccagcgccgcttgccgctgatggcgataaagcgtttgaacatatcctgatagctgaggtattccggcccggcgacgtcaaagatgcggtgttcttgcgccgggtgcgccagcagatcggccaggtaaaccagcaggttctccagcgccaccggcgaggacttcgagcgcacccagcgcggcggcgtcagcaccggcaggttatagaccatgtcgcgcatcacttcgaacgccgccgagccggggccgacgatgatgccggcgcgcagctcggtcaccggcacgccgctctggcgcaggatctcgccggtcaggcggcgggccgccaggtgcggcgaactgtcgtcgttcggctgcagcgcgccgagaaagatcacctgcttgacgccggcattgcgcagcgcgtcacgcagattttccgccgcctggcgctccttttcgataaagttgtcgccgtcgcccatcgcgtgcaccagatagtacagcgtatcgatctcccacagcgccgcgctcagggtttccgggcggtacagatcgacatacaggcagttgacctgcggccagttctgctcctgcagccactcgatgcgccgcgcggcggcggtaatctggtgcccctgttcgatcaggtgcgggatcaggttctggcctatatagccgctggctccaagaaccagtacgcgttggggtgtcatcgggccgccttgtgcggtgaaagagtcgcagaacgacaggatgccaaattcagggtttaaatgcactttttgtatgggtataagccagttgcatccgccgcggcgcaggttcacactacgcgccccttatcgaacgaagaccggatgtcatgaagctcaatgtgatttgttacgccctgctgggcctggcgctgatcgccagcctgttctcgccgcatccggtgtggatggggttgctgctggcgaacctgctgacgtttctgatctacggcggcgataagctggcggcgcgcaagggatggcgacgggtgccggagacgacgctgttgctgtttggcgcgctgggcggctggttgggcgcgctgctggcgcagcagctgtttcgccacaagacccagaagcagccgtttaaaacctggtttattctcagcgtggcgctcaacctggcggcgctgctggggctgtggtactgggtttacggccgctggatcttctgattgcggggcgcggcctgcgccccaagcgatcaggcgtgctgctgaagaaactcccgccacagttcgaccacccgctgcagatcctgacggctgacgtcgaggtgggtcagaatgcgtgtcagcgggccgctgctgatcagcacgccgcgttcgcgcatccacggatcgaatttggccaccagcgccggcgtttggcgcaggtacagcacgttggtctgcgcgccgggagcggcgatctccacgccgatctgccgcagctgttgctccagccaggccgcgttgtcatggtcttcgcgcagccgcgcaacgttatgctccagcgcgtagaggccggccgccgccaggatgccggcctgacgcagcccgccgccggtcatcttgcgccagcgcagcgcacgctgaatgaaggcctcgctgccgcacagcagcgatccgaccggcgcgcccaaccctttcgacaggcaaatggtgaaggtgtcgcagtattgcacgatctctttcagcggcaggttcagcgccacggcggcgttgaagatgcgtgcgccgtcgatatgcagcgccagctggcgctcgcgggtaaactgccacgcctgctgcaggtaggcctgcggcaggactcggccgctgatggtgttttccaggctcaacagccgggtgcgggcgaagtggatatcgtcgggtttgatggcggcggcgagcttgtccagcggcagcgtgccgtcggcgtcggcctcgatcggctgcggctggatgctgcccagcaccgctgcgccgccggcttcgtatttgtagttgtgcgcctgctggccgaccagatattcatcgccgcgctggcagtggctcagcagcgccaccaggttggcttgggtgccgctgggcagaaacagcgccgcttctttgcccgacagacgcaccgcctcggcctccagcgcgttgaccgtcggatcatcgccgtagacgtcgtcgccgacttctgcctgagccatcgcctggcgcatggcggcgctggggcgggtaacggtgtcgctgcgtagatcgataagcatagggttcctggaatgtaagggagaggaaaagggtacatggcatcatataccctttattttaccggggcagcttgcttagcgcagccagttggttttcgccagctcgaccacttcgtcgccgcggccgttgatgatggcgcgcagcatgtacaggctgaagcctttcgcctgttcgaacttgatctgcggcggcatcgccagctcttgcttggcggtgaccacgtccagcagcgccgggccgggatgcgccaacatctcctgcagcgcgccgtccagatcggaggctttttccacgcggatgcccttgatgccggcggcgttggcgatcgccgcgaagtccggattatgcaggtcggtgccgtcggtcaggtagccgccggccttcatctccatcgccacgaatcccagcacgctgttgttgaacaccacgattttcaccggcagcttgagctgcgccagcgacaggaaatcgcccatcagcatggtgaagccgccgtcgccgcacatggcgatcacctgtttatccggcgcggtggcctgagcgccgatcgcctgcggcatggcgttggccatcgaaccgtggttgaacgaaccgagcaggcggcgcttgccgttcattttcacgtagcgggcggcccacaccgtcggcgtgccgacgtcgcaggtgaagatggcgtcgtcgctggcatagtggctgagctgctgcgccagatactgtggatggatcggttggtcgtcgccggcggtcgccagcccgtcgagatccttgcgcgcgttgcggtaatgctccagcgccttgtcgaggaacgcccgatcgcgcttcggctccagctgcggcagcagggcggtgagggtggtgtggatatcgcccaccagcgccatattgaccgggcagtgcgcgccgatgctgccggggttgatgtcgatctgaatgatgttggcgttggtggggtagaacgcgcggtaggggaactgggtgccgagcagcaccagcgtgtcggcgttcatcatcgcgtgataaccggaggagaaaccgatcagcccggtcatgccgacgctgtacgggttatcccattcgatatgttctttgccgcgcagcgcgtgcaccaccggagcctgcagcagttcggccagcttgaccacttcatcgtgcgcgccggcgcagccgctgccgcacatcagggtgatgttcttcgccttgttcagcgtttccgccagcttgttcagctcgctcatcggcggctgcaccagcggcagcgccggggtatgccaggtcacggccgcgtcttccggcgccatgcgcagtgccacgtcgcccggcaagacgaccaccgacacgccgcgattgaggatcgccttgcgcatggcgatctccagcacgcgcggcagctgttccgggttggagaccagttcgcaatagtggctgcattcgcggaacagctcctgcggatgggtttcctggaagtagccgctgccgatttcgctggaagggatatgcgcggcgatcgccagcaccggcacatggttgcggtggcagtcgaacaggccgttgatcaggtgcaggttgccggggccgcaggaaccggcgcacaccgccaactggccggtaagctgggcttcggcgccggcggcgaaggcggcaacctcttcatggcgggggcccagccattcgatggtgcccatgcggtgcaggctgtcgctaaggccgttgagcgaatcgccggtcacgccccaaatgcgttttacgccggcttgatccagcgttttggcgatcagtgtggctacggtttgcttcatggttcccccaaacaaggtttgaaaaacgatgtggactcgatccggtgagtggcagcagaacaactgcaagcatagcttaccggctgtggacgagatgcggtcaggaagggtaaagagcgtaggacggggaaaagtgtaaccgggctggccgcggggagcttgccgataaatgccccatcgcggcgatggggccaggggatcacgccaatgtgacgtcgccctgcagctggcaactgcaggccagcacgtagccttgcgctacttcttcctcgctcagcgtcatggtgctggtggtggtgtagtcaccctcaaggatgcgggttttgcacgagccgcacaccccggcgcggcaggcggcgttgaccggcagggcatgggcctccatcgccgccagcagcgtgctgccaaccggtacgcggaattcgcgcagcgggcgcgcggcgcgcagcgtcagcccttcggtggcgtcggcctgcgccgccggcgtgtggaactgctctttatggaaacgctcggccggcacgccgagccggcggcacagctgctccacctgatccatgtagggcgcagggccgcaggtcatcaccgtgcgttcggcgatatccggcgccgcctgccgcagcgtctgttcatcgatgcggccgctgaggtagccgggttgcagatcccgctcggccatcagcgtcaggcgcagctgcggatgggcggcgcacagtgcgcgccactgatcggcgaaaatcgtgtcggcgggggtgcgcacgttaaagatcgcgacgatatcgcaggttggacggttggcggtcagccagcggcacatcgagacgatcggcgtcacgccacagccggcggccagcatcaggtaacgatcggccgggtggcgctcgcagctgaattcgccctgcgcgtcggacagccacagggtgttgccgggcttgacctcttgcgtcagccagcgcgatccgacgccgtccggcaggcagcgcacgctgatgctgagaaagcggctctggccgggcgaggaggagagcgtataggcgcgcagcgtctcctcgctgttgcggatgctgaccagcgcaaactggccggcctggtaaggatagaaaacgtcgcagatcaggttcagcgtccagacgtcggcggtttcacgctggatggaatgcacctgcatgcggttcgggcaaagcggagtgggttgagtcatcggggcacctcaaaaagcaaaggggccggcgcaggcggccccataacgtaacggcatcaggcgagcagcgctgcgatatcctgctcgacggtagtgatcgggcgcaggccgaatttctcgttgaggatcgccatcaggttgtcggtcaggaagcccggcgcggtcgggccggtgacgatgtttttcacccccagcgacagcagcgtcagcagaatgacgatcgccttctgttcaaaccacgacagcaccagactgagcggcagctcgttaacgctgcagccgagcgtatccgccagcttgaccgccaacatgatggcggagtaggcgtcgttgcactggccgacgtccagcaggcgcggcagcccttccagcgtgccgaaatccagtttgttgaaacggtatttgccgcaggccagcgtcatgatcaggcagtcttgcggcacgctgcgggcgaagtcggtgaagtagctgcgctcgtcgcggctgccgtcgcagccgccgaccaggaagacgtggcgcagttttttctgcgacaccaggtcgatgaccgtgtcggcggcgttcagcaacgtctggcggccgaagccgacggtgatcaggtgttcgatctcggtgtaagggaagccgttcatgccctgcgcctggcggatcacggcgccgaagtcgtcgccttccagatggttgacgcccggccagccgacgatgctgcgggtccagatacgatcgccgtagttgccgacgttaggatcgatgatgcagttggaggtcatcacgatcgggccggggaatttggcgaattccgtctgctggttttgccagccgctgccgtagttacccaccaggtgcttgaattttttcagttccggatagccgtgcgccggcagcatttcgccgtgggtgtagacattgacgttttgcccttcggtttgctcgagcagcatgcgcagatctttgagatcgtggccggaaatcagaatggctttcccggccaccgggcgcacgttgaccgcgctgggctgcggatcgccgtaggcctgggtttcaccgcgatcgaggatcgccatcacgttgaagttcatcttgccgatgcccatggcgttgttcagcagggtatcgacgtcgcgcggccgggtgccgagccaggccatgaaagcgtggtagtcggcatagagctgttcgtcgaactggccgagcacgtgcgcgtgttccatataggccgccgcgcctttcaggccatacagacacagcaggcgcaaaccgtgtacgtcgtcgccgacctcggccttgtcgctgtcgagggcaaactgcgccgcctgctgcagcagcgcaggcatagcgtcgccggccagctgcagcgccgccatcgggtgatcgacgcgcacgccggcgtccagcagccggcaacgggcggccagcgagtcgcgcagcagcagggtttcccgcgcgtagccgatgatgcgctgggaatcgaagttgacgttggtcagggtggagaagaaggcgcgcggggcgaagctgtcgatttcgtggtcgacgatgcccagcgaacgcgcctgcagcgcccaggcggagaggccctgcagcgccgccaccagcagatcctgcagatcggaggtttccgccgttttgccgcacatgccctgagcatacgcgcagccgttgcctgccggggtacgaatggtttgttcacattgcacacagaacatagtcgcttccttttatttttaaagttgcatttataatgcttgtttaaaagcatagatcggcgatcggggttgcaaaaggcttttgtgcgactactgcgggcaagtttgatttagcgcaattttgcggtgcggatgggaatgattacgctttgggggccaggcggcccccagggggaaaggatcaggagaacagggcgatcagcaccggcgccagcaggctcagcaggaagccgtgcacgatggcgggcggcaccatgtccagcccgccgctgcgctgcagcaccggcagggtgaagtccatcgaggtggcgccgcacaggccgagggcggtggagcggctgcggcgcaccagcgtcgggatcagcatgatcgccaccagctcgcgcgccagatcgttgaagaacgcggcgctgcccatcaccgggccgtaggcgtcggtgatcagaatgccggacagcgagtaccagccgaagccggaggccatcgccagcccggccttgaccggcaaccccagcagctgcgccgccagcgcgccgccggccagagacgcgacgaccaccgccaatgccaccagcgtgccgcggcggttgagcacgatctggcgcagcgtcatgccgctgttgcgcagctgaatgccgaccagcaacagcaggaagatcagcgcatattcgctgcctttatgggcgaactgcagccattgccactgcgtcaggccgagcaggaagccgccgagcaccacgccgcacagcttgagcgactccagcgccatgtgcacgcgcgaaggcagcttttcctgtttatggctgctgcgccacggcatgcgccgctccagcagcgccagcaacagcaggttggcgcagagaatgcagaagaaaaacactgcgctgtactggaagatcagcaccaggttgctgctgagattctccataaacgccaggctgatgcccatgaaaaacaggatcacgtacaccatccagctgagcagccggttgatcagcaccagcagcgggcgatggcgtaagggaatgaggtaaccgacaatcagcggtaacagaataatcaacagtcctgagtacatggtgcagcttgtgtccttgagttttgaagcgcgccgaacgccgacgaggagcacacgctaaccaaaagcccggccggagtaaagcggcagatttgacgttggccgcttgacctgcaaggggttttttgaccatgctctgtgaaggtcacctcattgaagaggcgacggcgcgcacgggaggcggcggatgttcttggagcgtatcgaaattgtaggttttcgcggcattaaccggctgtcgctgatgctggacgacaacacgctgttgctcggcgaaaacgcctggggtaaatccagcctgctggatgcgctgacgctgctgctggcgccggagcagaagctgtatcggtttgaagcgcacgacttccatttccctcccggtgaggaggcggccaaagagcgccacctgcaggtggtgttcaccttctgcgaaaaagacatcggccatgcgcacctgccgcgctatcgccacctgacgccgctgtgggtcaagggcgaagatggcttgagccgcattcattaccgctgcgagggcgagctggccgacgacggcacggtgtgcacctggcgtggttttctcgacgccgacggcaacgcctttcaactgcaccatatcgaacaattggcccacgccattatccgcatccatccggtattgcgcctgcgcgacgcgcgctttattcgtcgcctgcgccccagcagcctcggcgatgaacgcaaacccgatacccaggcgctggcgcagcagttggatcagctgacgcgcgagctggtgcgtaatccgcagaagttgaccaacggtgagctgcgtcaggggctggcggcgatgcagcaactgctggagcactatttcgccgagcagagttcacaggtgacgcggccgcgccgccgcggcggtgaaccggagcaggacgcctggcgcgcgctggacggcatcaaccgcatggtggccgagccgaacagccgcagcatgcgcctgatcctgctgggcatgttttccaccctgctgcaggccaagggcgacgtcaagctggatccccatgcccggccgctgctgctggtggaggatccggaaactcgcctgcatccgatcatgctgtcggtggcctgggggctgctcaatcagctgccgctgcagcgcatcaccaccaccaactccagcgaactggtgtcgctggtgccggtggagcacgtctgccggctggtgcgcgagtcggggcgggttgcgacctaccgtctcgggccgcgcgggctgagcgccgaagacgggcggcgcatcgcgtttcacatccgtttcaaccggccgtcgtcgctgttcgcccgctgctggctgctggtggaaggcgagaccgaagtgtggctgctgaacgagctggcgcgccagtgcggctaccatttcgaggcggaaggagtgagggtcatcgaattcgcccagtgcggcctgaagccgctgctgcgcttcgcccgccgcatgggcatcgagtggcatgcgctggtggacggcgatgaggcgggcaaaaagtacgctaacaccgtgcgcagcctgctggacaatcatgaagacaacgaacgcgatcggctgaccgcgctgccggcgccggacatggaacacttcatgttccgcgaagggttcgccccggtctatcaccgaatggcgtcggtgccgatcaacgcgcagatgccggtgcgcaaggtgatcctgaaagcggtccaccactcgtcgaagccggatctggcgatcgaggtcgcgatgcaggccggcgaatggggcacggactcggtgccgccgctgctgaagaaaatgttctcacgggtgatctggctggcgcgcggccgggcggactgacggcccgccgggcgttatcgggcgcagaaatgcgccgccaatccctgttccagttcgtccagcagctgatagcggcggcgatactcggcgcgcttcttgctggcaatttcttcgataggtttgcgggcgatgcgctcgggcagcaggaaatagccgctgtcgagcggtttggcgcccatcgacagccagaactgatcgtaatcggcgtgcagttggtccttcttcttactctggtagcgccagttttgatagatatgggtggcgttgccgacggctacgatccggcggatgccgagatgccgagccagcgtgcaaacgccttccagcaccagacgtttagggaacagaccgtgacactccttggtggtgtgctggatctcggcgtgcggcacgtcatggttcgcgccctgcaggccgccgatgaacaacgtcggctgctgctgataatgcatcagcgcaaaggtgatctccgccagcatcacgccgttggcgttgcgcagcagcaacgtggcttccccttccttattcagtttgtcgatcgccgccagttccagcgagatcggcgcttcgtttttgcccatcgcgcgggccagcacgaaaggctgtgggcctaggtggccgagacgcatcttcagcggcatgcgctgtacgatgagatcgtaatgatcgcgcagggcgaacaagcattcgatcttgctcatgttggccgccaggtagggacgatgcagtttgcacggcaggttcggctgcgcgttcaggatctcttccagcagcgggttgctggccagggtgctgagcaggccgctggtggtgcgccagttgagcagcgaacggccgagaaacttcaggcgaaacgaggtttttttccaggcgttgcttggcgccttttcgccattgatcagcgccgtcatcagttgccagccgttaagcggccggggggaggcgagtgggtagctgagctgtgacatgatgaaatccttggctgtgttgaatggcggtatttcatcaaggtttcactaaacgggagttcaatgctgaactgtaaccaggcgtgtctccacattgtgttgagctaaggtttagttattccctacgttgcatgctaatttagctccgccgccgcaatgggcggtcgatattcacaagcacaggcaggtcaattttgacagggtttaaaggacataaacgccgctggatactcgcactggcggtgattgcggcgcttgccgcggcggccgtttggcactttcgccatccggcgccgaccgatttcaaaacggtgaaggtcacccagcgcgatctgcagcagaacgtgttggcgaccggccagctggacgccgtgcgcaaggttgacgtcggcgcgcaggtcagcgggcagttggaaaaactgtatgtcgagatcggcgacaaggtgaaaaaaggccagttgctgggggttatcgatccgcaacaggcgcagaacagcatccgcgaaggcgaggcgacgctgcgcgaactgcatgcgcagctgctgcaggcgcaggcggaacagcagctggcggcggtcacgctgcagcgcaaccaggcgctggccaggctgcaggcggtgtcgcgtcaggatttggatcaggcggcgacgcagctggcggtgaagaaggcgcaggtgggcaccatcaatgcgcagatcgcccgcaaccaggccagcctggataccgccaagatcaatctggcctatacccgcatcgaagcgccgatggatggcgacgtggtgcagattaccacgctgcagggccagacggtgatcgcggcgcaacaggcgccgaacattctgacgctggcggatctcggcaccatgctggtgaaggcgcaggtctcggaggccgacatcattaacctcaagccgggtcagaaggcctggttcacggtgctgggcgatccgacccggcgcttcgacggcgtgctgaaagacattcagccgacgccggaaaaggtcaacaacgccatcttctattacgcgcgtttcgaagtgcccaacccggaaaggctgctgcgcttgcaaatgacggcgcaggtgcacattcagttggccggcgtccagcaggcgctggtgatcccgctggcggcgctgggcgatcagatcgccgacaatcgctaccacgtttcggtgctgaaacagggcaaggaagagaagcgtgaggtggccatcggcctgcgcaacaatatcgatgtgcagatcctcagcgggctcgaggcgggcgatgaggtgatcgtcagccgcggcggcgtggaggccggctgatggcggcgctgttgcagctgaacggcattcgccgcagctaccgttccggcgagcagacggtggaggtgctgaaggggatcagtctgagcatcgacgccggtgaaatggtggcgatcatgggggcttccggctccggcaaatcgacgctgatgaacattctcggctgcctggacaagccgagcgccggcgtgtatcgggtagccgggcaagatgtggcgatgctgagcgacgatgcgttggcgcagctgcggcgcgagcatttcggctttatctttcaacgctatcatctgctgccgcacctgagcgcggcgcacaacgtcgaggtgccggcggtgtatgccgggctgggcaaagcggcgcggcgcgaacgggcggaagcgctgttgcgccgtctggggctgggggagcgagtcaactatcggccgagccagctttccggcggccagcagcagcgcgtcagtatcgcccgcgcgttgatgaacggcgggcaggtgatcctggcggatgagccgaccggcgcgctcgacagccattccggcgaagaggtgatggcgatccttaaacagttgtgcgcccaggggcacacggtgatcctggtgactcacgatccggctgtggcgcgtcaggctgaacggatcatcgagatccgcgacggcgagattatcgccgactcgcggccggcaccgcaggagaatgcgcaggccaagccgctggcactggccgccgcggcgccttcctggcggcagatgggcggccgtttccgcgaggcgctgatcatggcctggcgcgcgatggcggccaacaagatgcgcaccgcgctgaccatgctcggcatcattatcggcatcgcctcggtggtgtcgatcctggtgatcggcgacgccgccaagcagatggtgttggcggacatcaaatccatcggcaccaatactgtcgatatctatcccggcaaggatttcggcgacgacgatccgacctaccggcaatcgttgaaatacggcgatctcgatgcgctgcgcgaacagccttacatcagtgcgctgtcgccgagcatcagcagcagcatgcggctgcgtttgggcaacgttgatgcggcggccaacgtcaacggcgtcagcgagcagttcttccgcgtgtacggcatgagctttacccagggcgtcggcatcgatccgatgcaggtacagtcgcaggcgcagacggtggtgattgacgccaatacccaacggcggctgttcccgcaccagaagaacgtggtgggggaagtgatcctggtgggcaacatgccggcgacggtggtcggcgtggccaaggagaagcagtcgatgttcggcagcagcaagacgctgaacgtgtgggtgccgtacagcaccatggccaaccggctgatgggcaacagctatttcgattcgatcaccgtgcgcatccgcgacggttacgacagcaaggaagcggagcagcaactgtcgcgactgttgacgctgcgccacggcaagaaggactttttcacctataacatggacagcctggtgcaaaccgcggagaaaaccacccgcacgctgcagctgttcctgacgctggtggcggtgatttcgctggtggtgggcggcatcggcgtgatgaacatcatgctggtgtcggtgaccgagcgcacgcgcgagatcggcatccgcatggcggtgggcgcccgttccggcgacgtgttgcagcagttcttgatcgaggcggtgttggtctgcctggtggggggcgcgctggggattacgctgtcgttcgccatcggcctggcggtgcagttggtattgccgggctggcagatcagcttcccgccggcggcgttgctgagcgcgttcctctgttccaccggtatcggcgtggtgttcggctatctgccggcgcgcaatgccgcgcggctgaatccgatcgatgcgctggcgcgcgagtaagtaaaaggcataaaaaatgccagtcacacggcggctggcatttttatcgcagtcagggtcaatgcagcgcgacgctgctggaggcgttcaggacagcgcctcgctttccaccggcacaatcagactggcatggttcccttttggcccttgatgcacgtcgaagctgacctgctgacctgccttcaacgttctgtaaccatccatcttgatggtggaataatgcgcgaaaatatcttcgccaccgccggctgggcagatgaagccaaagcctttggcgttgttaaaccatttaacagtacccgtctccatgcttttacatccctcgcaacgctattttaagtgagatgaataactgaattcgcacccgccgtgggcgggtagcagggtggacaaggggtggttaaaagaccaccagccacgaatttacactctagagcaaatgatcggggcgtcaagggatcggcttttgtcggcggggagcagttcaccaaagtttgaagcaggtaacgctattgccacgattcagtcacaattggcccgtttttttgcgcacgttacagtgcggcgggacgatggcgaagatgataaaatagtaactatccccactttgaataaccgaaacctgtccccatatcagagggcagagcagagaagatgagcagcgatgggcaataacaacgactggctaaattttgaacacttggccgaagaaaaacaaatcgatgcggtaaaaccgccgtctatgtataaagttatacttaacaacgacgattacacaccgatggaatttgtgattgacgttctgcaaaagttcttttcttatgatattgaacgcgcaacgcaactgatgctcacggtccactatcaaggcaaggcgatctgtggtgttttcaccgccgaggtggcggaaaccaaagtcgtccatgtgaaccggtacgcaagggagaacgagcatccgttgctttgtacgctggaaaaagcctgaataaggcaatctattggggaggtgcttatgctcaatcaagaactggaactcagtctcaacatggctttcgccagggcgcgtgagcacagacacgagtttatgaccgtggagcacctgttgctggcgttgctgagcaaccctgccgcgcgagaagcgctcgaggcatgtacggtggatctggccgcgttgcgccaggagctggaagccttcatcgaacaaaccacaccgacgctgcccgccggcgaagaagagcgcgacactcagccgacgctcagcttccagcgcgtgttgcagcgcgcggtcttccatgtgcaatcttccggccgcagcgaagtctccggcgccaacgtgttggtggccatcttcagcgagcaggagtcgcaggcggcctatctgctgcgcaagcacgacgtcagccgtctcgacgtggtgaacttcatttcacatggcacgcgtaaagacgagccgggccaagcgccgaatgcggaaaacccggtgaacgaagagcagtccggaggggaagaccgtatggaaaacttcaccaccaacctcaatcagttggcccgtgtgggcggcatcgatccgttgatcggccgcgatcgtgagctggagcgcgcgattcaggtgctgtgccgccgtcgtaaaaacaacccgctgctggtcggcgaatccggcgtgggcaagaccgcgatcgccgaaggcctggcctggcgtatcgtgcagggcgacgtgccggaagtgatggcggactgcacgctgtattcgctggatatcggttcactgctggccggcaccaaataccgcggcgacttcgagaagcgcttcaaggcgctgctcaagcagctggaacaggatcagaacagcatcctgttcatcgatgaaattcacaccatcatcggcgccggtgcggcttccggtgggcaggtggatgccgccaacctgatcaaaccgctgctgtcgagcggcaagatccgggtgatcggctcgaccacctaccaggagttcagcaacatcttcgaaaaggatcgcgctttggcgcgccgcttccagaagatcgatatcaccgaaccgacggcggaagagaccgttcagatcatcaacggcctgaaggccaagtatgaagcgcaccatgacgtgcgttataccgccaaggcgatccgcgccgcggtggagctgtcggtgaaatacatcaacgatcgtcatctgccggacaaggcgatcgacgtgatcgacgaggcgggcgcccgcagccggttgatgccggccagcaagcgcaagaaaaccgtcaacgtggccgatatcgaatccgtggtggcgcgcattgcgcgcatcccggagaaaaccgtgtcggccagcgatcgcgacgtgctgagaaatctgggcgatcgcttgaagatgctggtattcggccaggatcaggcgatcgaagcgctgaccgaagcgatcaagatgagccgtgccggtctgggccacgagcgcaagccggtcggttccttcctgtttgccgggccgaccggggtcgggaaaaccgaggtcaccgtacagttggccaaggcgatggatatcgagctgctgcgtttcgacatgtccgagtacatggagcggcataccgtcagccgtctgatcggcgcgcctccgggctacgtcggttacgatcagggcgggctgctgaccgatgcggtgatcaagcatccgcatgcagtggtgctgctcgatgagatcgagaaggcgcacccggacgtgttcaacctgctgctgcaggtgatggacaacggtacgctgaccgataacaacggccgcaaggcggacttccgcaacgtgatcctggtgatgaccaccaacgccggggtgcgggaaaccgaacgcaagtcgatcggcctggtgcagcaggacaacagcaccgacgcgatggaagagatcaagaaggtgtttacgccggagttccgcaaccgtctggataacatcatctggttcaaccatctgtctaccgaggtgatccagcaggtggtcgacaagtttatcgtcgaactgcaggcgcagctggatgcgaagggcgtctcgctggaggtgagcgacgaagcgcgtgattggctgtcggtgaagggctacgaccgtgcgatgggcgctcgtccgatggcgcgcgtcatgcaggaaaacctgaagaaaccgctggccaacgagttgctgttcggctcgctggtggacggcggttccgtgaaggtcgagctggacaaggacaagaaacagctgacctatcacttcctcagcgccgccaagcgcaaagcggacgagggcgcggtgcactaaggctgccttcaggcaaagaaaaagcgatgcttcggcatcgctttttttatgggtgagattcaccgtacagcagaaacgagtgagccctctcagtttacctgcgcacctgcaacccgttgtataacgtcgctgcgggggtaaacggaaagggctcccgagggatattacatcctcgatgccgccagcgtgtggcgcgcgatgagccgattaacggctacggaagacaatgcggcctttgctcaggtcgtacggggtcagctctacagtgactttgtcgcccgtcaggatgcggatatagtttttacgcattttaccggagatgtgtgcggttaccacgtgcccgttttccaattcaacgcggaacatggtgttcggcagcgtatcaagaacggtgccctgcatttcaatattgtcttctttggccatcgaatcctctaggtctaactaccttagtttttaaccggcaagataatgccgaaaaacccccattatgtaaagatgtgtcggtgaacattgcaccgtttccaccaattagtttgctgggcagggcggttcaaccggctgtggggatatgacttgcggcgcccagcacgccggtgccaaaggccgccgttgaagggtgctgagctgctgcaaaaattgacggcgcggaatttcacgcgcgccaaggcgggcagtgtgagcgttcagcacctggcagtcaatcaattccccgccataagcggcaaaatggcggcaaaaggccatcaatgcgcattttgaggcgttggtgacgcggctgaacatcgattcgccgcagaataacgcgccctgcgccacgccgtacatgccgccgaccagttgatcatcctgccatacctccaccgagtgcgcgtagccgaggcgatgaagatgttgataggcgcgctgtacctccgggccgatccaggtgccttcatccggccggtgggcgcaggcggcgatcactgaggcgaagtcgtgattaagcgtgatgcgaaacggatcgtggcgcagaaagcgtttcaggctgcggttgagatgaaactcggccgggaacagcaccgcacgcggatcgggtgaccaccacagaatcgcttcccccggcgagtaccaggggaagatgccgcgctcgtaggctgccagcagccgtggtgccgtcaggtcgccgccgatcgccagcaggccgttgggatcgcgcagggcgccctcaggcgagggaaacgccagcgactgaggggaaagcttaacgatgcgcatacagggtttctgcgtcctctacgggccgattacggcgccaggttgctgatacggttgcgaaagcgggcatagcggccctgctggcgcattagggcggcgtgatcgccctgttcgacaatttggccgtcatccattacgcaaatgcgatcgagatgctccaggccgtacaggcggtgcgtcaccaggatcagcgtcttgccctgacaatgccggcgcagcagcgccaggatctgctgctcggtctcggcgtccagcccttcggtgggttcgtcaagcaacagcagcggggcagggtgcagcagcgcgcgggcgatgcccagccggcgctgttcgccgccggacagctgccggccgccttcccccagccaggcgttcagcccgccgtcgctgtccagcaatttgccgagccccacctgctgcaacacctcgctcaggcgagcgtcgccggcatccggtgcggccagccgcaggttttcccgcagcgtatcgctgaagatatgcactcgctggctgacgaccgtggtcattcgacgcagcgtggtttcatcataatcttccagcggttcgccgttgagcagaatttttccgccgtcggtgcgccaggcgcgggtcagcagctgcagcagggtggacttgccgcagccggtgcggccgagcaaggcgatgtgttcgccggctgccacctcgagcgtgacgtcgcgcagcaccggctgcggctgatcggggtaggtgaaactcaactgccgcaggctaagctgagcccggtcggcggcggccgggccgacggccgggaaggagacttccggttggcgatcgatgatctgtttgacccgcgtggcggaggcgatcacctggccgaggtgctggaaggcgccggccaccggcatcagcgcttcgaacgacgccagcgcggcgaagacaaacagcgcgatcagcgcgccgggttgggtatcgccgccgatgccggcggcggtcagccacagcagcagtgtcaccgtcagcccgctggcgaggatcatcagcgcctgcgccttgccgctcagcgaggcttgctgccactggcggcgttgccacagctgttcggtggcgttcagcgtctggcggaagtcgttgacggcgccgaacaccaccagctccgcctgcccctgcagccaggcggtcaggtcggtgcggtattggccgcgcagggcggtgagttgcccgccgatcggtttgccggcgcgatagaacaccggcggcaccagcagcaacagcagcaacagaatgccgccaagcgtcagggcaagcgcaggatccagccagctcaggccgtaggtgaccaccaggatcaccgccgccgcgcctaccagcggcgagatcacccgcagataaaggtgatccagcgtgtccacgtccgccaccaggcgattgagcaggtcggcctggcggaaacgggcgatgccgcccggcgtcagcggcaggatcttgctgaaggtgaacacccgcaggtgcgacagcacgcggaaggtggcgtcgtggctgaccacgcgctcggcgtagcgcccggcggtgcggaagatcgccgcgccgcgcacgccggcggccggcagcatatagttgaaggtcagcaggcccgccaatccggccagcgaagaggcggccaggaaccagccggagagcgccagcaggccgatgctggccagcagggtgacgatcgccaaaaggatgcccaggctaatcagcaggctatggcggcgatacaacgccaaaaacggcagcaaaacgcgcatgattaaagctccccgcggcgatgggcgatcagcgtggcgaacaggcccggctgggcgctgagggtggcgtaatcgccctgttgcacgatgcgcccgttatccatcacccaaatctgatcgtagtcttcggtatcttccaactggtgcgtcaccagcagggtggtttgctgatgcgaagcggcattcaacgcctgcatcacccgttgttcgctatgggcatcgaggctggcggccggttcatccagcagcagcaggcggcgcgggccgatcagcgcccgggcgaccgccacgcgctgcgcctggcctaccgacaggcgggcggcgttgtcgcccacttcggtgtcgagcccctgtggcagatagggcaacagttcgctgacgtaggcgtgttccaccgcctgctgcagctgcgcttcgtcggcctgtgggcagcccaacaggatattggcgcgcaaggtttgcgccggcaggtgcgggttctgcccgacccagctgagctgttgacgccagttttctgcggacagttcacgcagctcgacgccgttgacggtcaacgacccacggtagggcaggaagccgagcagcagattgagcagcgaacttttaccggcgccgctcagcccgaccagcgccacgcgctgctgcggttgcagggtgaaactcagcggcccggccagcagcacgccgttcggcgacaggatttccaacgcgttcgcctgcaacgtcagcggctgatcggcgggcagctgccgcgtgccgttgcccatctgctcgccttcggcgctgaggaaggtttccagcgcctccgccgcgccgaccgcctgtgctttggcatggtagaaggtgccgagatcgcgcagcggttggaaaaactccggcgccagaatcagcaccagaaaaccggaaaacagcgttacgccgaggccgtagctgccgaaattgagttcgccgaggtaggaaaagccgaagtacaccgccaccacggcgatggaaatcgaggcgaagaactccagtacgccggaagaaaggaaggccatgcgcagcacttccatggtgcggctgcggaagtcttcggaggatttggcgatttgcgcggtttcggcctgcgcgcggtcgaacaaccgcagggtgtccaggccgcgcaggcggtcgaggaagttgccgctcaatcgcgccagtgccacgaagttgcggcggttggcgtcggcggcccccataccgaccagcgccatgaacagcgggatcagcggcgcggtcgccaacagaatcaaaccggcggcccaattgatcgggaaaacggcgatcaggatcagcagcgggatgaagaccgccagatacatctgcggcagatagcgcgagtaatagtcctgcatatcctcgatctgctcgacgatgatgctggcccaactgcccgccggtttgccctggatccaggccgggccgagctgctgcaacttatccagcacctgctggcgcatgcgctgacggatcacctggccacactggaaaccgacccgctcccgcagccagctcaacagcgcccgcaatgcgaacgcgacgatcagccagataaacgaagggatcagctgttcgcgcgggatgtgctcgatgatcagggcgtgcagcaggctggccagcagccacgcctgcgccacgatcagcaggccgctgaacagccccaacagcatggaaaggcgcagccaacgctgcgctaacgaactctgggttttaagccaacgggttaactgttgctgtctggtttttttcatcagatatgcgtctgcgtcgccggcgcccgtttgttacgggctgggttaacgtactgttaaataatagtgtttggcgcaatcggcgacaaacaagcgaggtcccatgttacctcgtcacccggcagactgaaaataataaagcggccaaatgtggctataacagacgcgggaaggagagtgcggaggggggaaacaaaaaaagcggcccgagagccgctttttgctgatgacgagaaagtcttagcagacttctgcgccggcgatgccgtccaggtaacgttctgcgtccagcgccgccatacagccggtgccggcggaagtgatcgcctggcggtagacgtgatccatcacgtcgcctgcggcgaagacgccggggatagtggtttgggtcgcattgccgtgaatgccggactgtaccttgatgtagccgttttccagctccagctggccgccgaagatgccggtgttcgggctgtggccgatagcgatgaacacgccggccagttccagttcacgggtttcgttttccgctttggtgctgcggatgcgcacgccggtcacgcccatttcatcgcccagcacttcgtccagcgtatggtcggtgtgcagcacgatgttgccgcttttcactttttccatcagccggtcgatcaggatcttctccgagcggaagctgtcgcgacggtggatcaggtgaacctcggcggcgatgttggacaggtacagcgcctcttcaacggcggtgttgccgccgccgaccaccgcgactttctggttgcggtagaagaaaccgtcgcaggtcgcgcaggcggaaacgcctttgcccttgaaggcgtcttcggaaggcaggccaaggtagcgggcggaggcgccggtcgcgatgatcagcgcgtcgcagctgtattcgccgctgtcgccgaacaggcggaacggacgctgctgcagatcgacgctgttgatatgatcgaagacgatttcagtctggaacttctccgcgtgctcgcgcatgcgctccatcagcgccgggccggtcaggccttcggcgtcgcccggccagttttccacttcggtggtggtggtcagctggccgccttgctccagaccggtgatcagcaccggattcaggttggcgcgcgccgcgtagacggcggcggtgtaaccggccgggccggagcccagaatcagtaatttgctatgtttagccgtgcccatgaataacctctttattccacaatggcggacaatgaagccgattgtagggaaaatggcgcagtaaaaaaagcgccgggcgacgttgttaacgatttgtatgatagttgtcgcctattaatgcacccgctgtcggcaaatcgtacgccgaacgcagaaatttaccttatcaaagccgcattcggctgctgaatcgccaaccgcgcaaaaacggcgcattctgcgacttcagccgctccccgccggggtttatctgccagcgattcataaccaaaaatgggatgcagacttttcgtgacggtacgttgttctgattttgcttcttttactttgacaatccgctgcgcatttgcgaaaacatcataggaagaagaaattatccccgtaacaccagcaaatcgtacgtatttgcgccgcgaggcggcaatgcgcgatgggtgtgcggagcagagcgcgcaagcgtttgctgattttttctcgacctaaacgtcgttacctgcatcgcgcggagttggacagacaggctgcgcggcgtggaatgatggtagtgaagaagcatatgacaggcatcgggtcttcgcttggaacgaacccttacacattgacgttggctagggtgtggcaagtgcacggaagaaaataagagagacaataataatggcagacaacaagaaacgcccgggtaaagatcttgaccgtatcgaccgcaacatcctgaatgagctgcagaaggatgggcgtatttcgaacgtcgagctttcgaagcgcgtggggttatccccgacaccatgtttggaacgcgtgcgccgtctcgagcgccagggtttcattcatggctataccgcattgcttaacccgcattatctggatgcgtccctgctggttttcgtggagatcacgctgaaccgcggcgcgccggatgtgtttgagcaattcaactcggcagtgcagaagcttgaagagattcaggagtgtcatctggtttccggcgatttcgactacctgttgaaaacccgcgtaccggacatgtcggcttaccgcaaattgctgggcgaaaccttgctgcgtttgccgggggttaacgacacccgtacctacgtagtgatggaagaagtgaaacagagtaaccgtctggttatcaaaacacggtaaggtgcaggtgcaaaacctgattaaattggttacactcctgtttattcatacagtttcggcgccggggcagtttctcggcgctgttgctatgtcagctaacaggaacctggagagcctttcttgagccaggaatatacagaagataaagaagttaccctgaaaagactcagcagtggccggcgtttgctggaagctgtgcttatcgtggtagcgatttttgccgtttacctcatggctgcgttggtcagtttcaatccgtctgacccaagctggtcgcagaccgcgtggcatgagccgattcacaatctgggcggcggtgtcggggcctggttggccgatacgctgttcttcaccttcggggtgctcgcctacgcgataccgccgatcatgctggtcctgtgctgggcggcttatcgccaacgcagcaacagagactacatcgactatttcgcgctttccctgcgcctgatcggcaccctggcgttagtgctcacctcctgcgggctggcggcgctgaacgtcgacgatctctattacttcgcttccggcggcgtgatcggcagcctgctgagcaacgccatgttgccgtggttcaacggcatcggcgctacgctggcgctgctgtgcgtatgggcggcggggttgacgctgtttaccggctggtcctggctggtgatcgccgagaagatcggcggggcggtgctgggcgtcgcgacggtgatgaccaatcgctcacgtcgcgaagagcgctattttgaggatgacgagcgttacgtcgacgacgagcctgagcaggcagggaagggcgccgccgcagcggttgccgcgaccgccgccggagccgcggccgccgatgacgacgtgctgttctccgcgccttcggtcaccgacagcgccaaagcggcggcggaagacgccgccgatccgttgctcagcggcctgcgcgccgacgatggcgagcttgaagcagaagccgcatccatcgcgccggcggcttcgcctgcaccggcggtgaaggcagagatccacgagcccgttgcagcgccgatcgccacacaggcgccgtcggtgacggtggcgccggccgcgccggcctctgtcaatcagcacccggtgagcgccccggcgcaagacgctacgccgccgctgtattccttcgagatcccggaagaaacgcccgcgcctaaggcgacgcgtcctgtcgatccttatcaggatgacgatgagccgcgcctcggcaactggcaagagccggccgcaccgcagccgccggcgcgctctccctttgattttaccgccgcacagcgtgacagcgtcgacatcggcaattcgagcggtttcagcgccaccggcgccaaaccgcagccggatacggcggcagccgctgctgctgcaggtgccgcggcggcgacctttatgccggccttcacggcgaccagcgacggcaatccgcaggttaagcagggcatcggccctgaactgccgcggccgaatccggtgcgcatcccgacccgtcgcgaactggcttcctacggcatcaagctgccttcgcagcgtgcggccgaacaggagcagcgccagacagaggcggtggtgaacccgcaggaagaagaggcgctacaggaagccgcgctgcgtcaggcgtttgccgagcagcaaagccagcgctatggcgaaagctacgcgccggagcaggatgatgaacaggctcagcaggaggccgagctgagcaaggcgtttgccgagcagcagcaccaacgctacggcgaaggctatcaacaggacgacgaagaggcgcagcaagaggccgcgctgcgccaggcgttcgccgagcagcagcaggcgcgctacggccagcaagcacctgctccgcaggcaccggccaccagcccgatcgatacccgcaatgctttcagcttctcgccgatggcggatctggtggacgatggcccgagcgagccaatgttcacgctgtccccgcagcttgaagagcgcattgaacagcaaagcgagcaggaggacgatgtgccgttcggtcagtttgagcctgtggcgcctgcggctcaacctcagcaatcgcatcagccgcctcaacaataccaacagccgcagccgcagcaataccagcagccgcagcaacagcagtatcaacagccgtcgcagccgcaatatcagcagccgcagcaaccggcgcagcagcagcctcagcaagctcaggccgagcaacatccggcgatggacagcctgattcacccgttcctgatgcgcaacgatcagccgctgcagaagccgaccacgccgctgccgacgctggatctgttgaccgaagcgccgaaagaggtggagccggtcgattccttcgcgctggaacagaaggcgcgcctggtggaggccagcctggctgattaccgcgtgaaagccgacgtggtggacatcctgccggggccggtcatcacccgcttcgagctggatctggcgccgggcgttaaagcggcgcgcatttccaacctgtcgcgcgatctggcgcgctcgctgtcgacttcggcggtgcgcgtggtggaagtcatccccggcaagccttatgtcggtctggagctgccgaacgccaaacggcaaacggtgtatctgcgcgaagtgctggattgcccggctttccgtgacaatccgtcgccgctgtccatcgtattgggtaaagacatctccggcgaaccggtagtggccgatctgggcaaaatgccgcacttgctggtcgccggtaccaccggttccggtaagtcggtcggggtcaacgccatgatcctgagcatcttgtataaggccacgccgaaagaagtgcgctttatcatgatcgacccgaaaatgctggagctgtcggtttacgaaggcattccacacctgttgaccgacgtggtcaccgacatgaaagacgccgccaacgcgctgcgctggtgcgtgggtgaaatggaacgccgctacaagctgatgtcagctctgggcgtgcgtaacctggccggctacaacgagcgcgtcgatcaggccgaagcgatggggcgtccgatcccggatccattctggaagccgaccgacagcatggacatcacgccgccggtgctggagaaagagccgtacatcgtggtgatggtcgacgaattcgccgatctgatcatgacggtgggcaagaaggtcgaagagttgatcgctcgcctggcgcagaaagcgcgtgcggcgggtatccacctggtgctggcgacccagcgtccgtcggtggatgtgatcaccggccttatcaaggccaacatcccgacgcgtatcgcctttaccgtgtcgagcaagatcgactctcgcaccatcctcgatcaggggggcgccgagtccttgctgggcatgggtgatatgctttatctggcgccgaactcctcgatcccggtgcgcgtacatggcgcattcgtgcgcgatcaggaagtgcatgcggtggtcaaggattggaaagcgcgcgagcggccccaatataaagagggcattctcagcggcggtgaagacggcgagggcggtgccggcggcggcatggacggcgacgaagagctggatccgctgtttgaccaagcggtggatttcgtggtggataaacgccgcgcctccatctccggcgtacagcgccagttccgtatcggctacaaccgcgcggcgcgcatcatcgaacagatggaggcgcagggcatcgtcagtgagcaggggcataacggcaaccgcgaggtgctggcgccgccgcggcatgactgatggtttagccgttgcaattcaataagaaagggccgcttaagcggcccttgtgcaaagaagcgtaaacccgtttcttctcggaacattggcctaccggccgatcgccggcttcaggtaaagtaacgggagtaaagggttgattgacccgcacggcgtcgccctgcggttaacgcatttcataaggtatctggaataatgaaaaaactgttagttgcctgctgtctgctttcgggattcgcttctacctccgtgctggccgacgccgcacaggatctgcaaagtcgcctggcgaaggtgaacagtttccacgccagcttctcgcaaaccgtgaccagcgccgaaggcgccgcggtgcaacagggtgaaggcgagctgtgggtgaagcggccgaacctgttcaactggcacatgacctcacccgatgagagcgtgctggtctccgatggccaaaccctgtggttttacaacccgttcgtcgagcaggtgacggcgacctggttgaagaacgccaccggcaatacgccgtttatgctgatcacccgcaataatgccagcgactggaaacagtacaacgtgaagcaaaagggcgatgatttcgaattaacgccaaaatccgccagcggcaacctgaagcaattcgccatcagcgtgaccaacagcggcaccatccgcagcttcgccgcagtggagcaggacggccagcgcagcgcttatacgctgaaaagccagcagaacgttgccgccgatccggccaaattcaaatttaccccgccgaagggggtgacgctggacgaccagcgccagtgaggtgcaagtgagtaataatctgtcgctcgatttttcccagaacgagttccagccgttggccgcgcgcatgcggccgaccacgctggcgcagtatatcggccagcagcatctgctggccgccggcaagccactgccgcgcgccatcgaggccgggcagttgcactcgatgattttatgggggccgccgggcaccgggaagacgacgctggcagagctgatcggccgttatggtcaggcggatgtcgaacggatctccgccgtgacctccggcatcaaggagatccgcgaggcgatcgaacgggcgcggcaaaaccgcgacgccggccgccgcactattctgttcgtcgatgaagtgcaccgcttcaacaaaagtcagcaggacgccttcctgccgcacattgaagacggcaccatcacctttatcggcgccactaccgaaaacccgtcgttcgaattgaactcggcgctgctgtcgcgcgcccgcgtgtatctgcttaaggcgctgaccgccgaagatatcggccaggtgctggatcaggccatgaacgacaaggcgcgcggctttggcggccagaacgtcgagctgccggcggaaacgcgccgcctgctgtcggagttggtgggcggcgatgcgcgccgggcgctgaacagcctggaaatgatggcggacatggcggagatcgacgccaaaggcgtgcgggtgctgacgccgcagctgctgaaagaggtgtcgggcgagcgcagcgcgcgcttcgacaacaagggcgaccgttattacgacctgatttccgcgctgcataaatcggtgcgcggttcggcgccggacgccgcgctgtattggtatgcgcgcatcattaccgccggcggcgatccgctctatgtggcgcgccgtctgttggcgatcgcctctgaagacgtgggcaacgccgatccgcgcggcatgcaggtggcgatcgccgcctgggattgcttcacccgcgtggggccggcggagggcgagcgcgccatcgcgcaggcgattgtttacctggcctgcgcgccgaagagcaacgcggtttacaccgcgttcaaggccgccatgcgcgacgccagggagcaggccgattatgacgtgccggagcatttgcgcaacgcgccgaccaagctgatgaaggagatggggctgggggcggagtaccgttacgcccacgacgaacccaacgcctacgccgccggcgagaactacttcccgcccgaaatggcccatacgcgctactaccaaccgacctcgcgcgggctggaagggaaaatcggcgaaaagttggcatggctggctgagcaggatcaaaatagcccgacaaaacgctaccgctagcgtggccgttgcggtaaggttagcgggtatcactcttcttttatgcggctataaatcagccgcatagaacaacaacacttctttcaataacaacaagcacaggattagcatgctcgatcccaatctgctgcgtaatgagctagacgcagtcgccgtcaaactggctcgccgaggctttaaactcgatctggatctgctgcgttcgcaggaagaacgccgcaaagttctgcaggtagaaactgaaacgctgcaagcggaacgcaactcccgatcgaaatccatcggcgcggccaaagcgcgtggggaagacatcgagccgctgcgtcgcgaagtgaacgagctgggtgacaagctggatgccgccaaggcggcgctggatgcgctgcaaagcgagatccgcgattacgccctgacgctgcctaacctgccggacgacgcggtgccggatggtaaagacgacagcgaaaacctggaagtcacccgctggggcgaaccgcgccagtacgacttcgcggtgcgcgatcacgtcgatctgggcgaaatggccggcgggctggattttgccgccgcagttaagctgaccggttcacgcttcgtggtgatgaaagggcaaatcgcccgcatgcaccgcgcgctgtcccagttcatgctggatctgcacaccgagcagcatggctatctggaggcctacgtgccttatctggtcaaccacgccacgctgtacggcaccggccagctgccgaagttcggcgaagatctgttccatacccgcccgctggaagaagaagccgacagcagtaactacgcgctgatcccaacggcggaagtgccgctgaccaacctggtgcgcgacgagatcgtggaagaggaaactctgccgctgaagatgaccgcacacacgccatgcttccgtgcggaagccggttcttacggccgcgacacccgtggtttgatccgcatgcaccagttcgacaaggttgaaatggtgcagatcgtccgcccggaagattcgatggatgccctggaagagctgaccggccacgcggaaaaagtgctgcagttgctgaacttgccttaccgcaaggtgctgctgtgcaccggcgacatgggcttcggcgcgtgcaagacttacgatctggaagtgtggctgccggcgcaggatacctaccgcgagatctcgtcctgctctaacatgtgggacttccaggcgcgtcgcatgcaggcgcgctgccgcagcaaggccgacaagaaaccgcgtctggttcacacgctgaacggctccggcctggcggtcggccgtacactggtggcggtgctggaaaactaccagcaggccgacggtcgcattcaggtgcctgaagtgctgcgtccttatatgggcggcctggaatatatcggctgaacagccaatcactagaaaaaagcgcctgcgggcgctttttttatgtcgagaattcagcctttcgccagcgcgtaggcttgtttaatgtagtccgccaggtgcttgcttttcacttcggcgggcgagtgaagcttgatgtgccgccgatattggccgttgccttcaagttgctgatagcgatcttccagtcggtgcccttggccgaattccaccgtgacgtgattgcggtaggcgaaaacgccgcagaaaaattgagtatgcgagaacatgatgccgccgtatttgaccgattcgctgacgccactgccgctcgccgtggcgatccggcgcacctgttgtacgatctccagcagctcgccgtgcgtgctgccgatgtccgccagcaaggtctcgaccgccgcattatttgcctgactcatctcgcttctccgtcgttaaatccgctctgcgctgagcatagcgctttttcagccgcttagccggaaacaaatcgtgcgctggaatgataagaggcgattgacttttttatcgccagtggcatgatgcgcgcactctcattgcgcgttcggtcacaatttcactatgtccgcttactcccgcccggtgctcttattgctctgcggcctcttgctgctcacggtatccattgccgttttgaatacgttagtgccgctttggttaacccatgctcagctgtcgacctggcaagtgggtatggtcagctcctcctatttcagcggcaacctgttgggcacgttggtcgcgggcaaactgatacagcgcgttggcttcacccgcagctatcatctctcttgtttgctgttcgccgccgcgaccgccggcatggtgctgtcgatcgatttctggagctggctgggctggcgcttcttcgccggcgtcggttgcgcctggatctgggtgattgtggaaagcgcgctgctgcgcagcggcaatctcagcaaccgcggccagctgctggcggcctatatgattgtctattacctcggtacggtgaccggccaattgctgttgagcatgacctcgaccgaattgctgcacgtggtgccgtgggtgaccgcgattgtgatcagcgccatgctgccgatgctgttcgcgcgggtcaaccgccatgaagacgagccgcagcaggcggcggtgtggacaatgttgagacgccgcagcgcgcgcctcggcatcaacggctgcatcatctccggcatcgtgctcggttcgctgtacggcctgatgccgctgtacctctctcatcagggcatgagcgacgccaacgtcggttactggatggcgctgctggtcagctccggcatcgtcggccaatggccggtcggacgcctggccgatcgttacgggcgcctgctggtgctgcgcattcaggtgttcgtggtgatcctcgccagcgtggcgatgctcggcaactacgccatggcgccttcactgttcatcctcggctgcgccggctttaccctgtatccggtagcgatgtcctgggcctgtgagaaggcgctgccgcacgagctggtggcgatgaaccaggcgctgctgatgagctacaccatcggcagcctgctgggcccatcaatgacggcgctgctgatgcagaactattccgaccgcgtgctgttcgtgatgatcgccgccgtggcgctggtttacctgctgatgctgctgaagaagcagaaaccggatcgccaccatacgccgttcgccgccgcctgagcataaaaaaaccggccatgagccggtttttctttggcgctgcgccaatcagtagatcactttgtggccgtagctttccaggatgcctttgacgcgatccatggtctcggccttcggcggatgcacgccgtccagcttgtactcttcccccatcgccacccatttgtgcttgcccagctcgtggtagggcagcagctcgattttctcgatgttggtcatgtctttggtaaactcgcccagcaaatgcgccgatttgtcgtcgtctgaccaacccggcaccaccacgtagcggatccaggtgcgctggttgcgtttcgccaggtagcgggcgaattccagcgtgcgatggttggagacgccgaccagattctgatggatctcatcgttcatctgtttcagatccagcatcaccagatcggtggtgtccagcagctcgtcgatcaccggatcgtagcggcgcacgaagccgttggtatccaggcaggtattgatgccttcggcatggcaggcgcggaaccagtcgcgcacgaattcagcctgcaggatcgcttcgccgccggatgcggtcacgccgccgccggaagcgttcatgaagtggcggtaggccaccgcgtctttcatcagctcttcgacggtcacttctttgccgccgtgggtatcccaggtgtcgcggttatggcaatagaggcagcgcatcaggcagccctggaagaagacgataaagcggatccctggcccgtcgacggtgccgcaggattcgaaggagtggatgcgaccagttactgacattgcggggttttctccaatattgactgtcaaacgcagtctaaaaataggcgcgtggccgccggccaggtatctgcgatgcagtggcggagtgagcccgccaccgggggtaatgatgcctgtcggccggtcagttgccggataactgttttgccggctatccattcagtatagatgtccggcaaaacagactcgtacagagtcaggggagagcggtgggagaaaagggccggcagaaccggccctgacgttgctaccgggcagtttcccgcccggtcggcgttattacatcgtttgagtgaaggtacgagtaatgacgtcctgctgttgctctttggtcagcgagttgaagcgcacggcgtaaccggagacgcggatggtcagctgagggtatttctcagggttttccatcgcgtccagcagcatttcgcggttcattacgttgacgttcagatgctgaccgccctcgatggaggcttcatggtggaagtaaccatccatcaggcccgccaggttggctttacgcacgtcgtcgtctttacccagcgcgttaggcacgatggagaaggtgtaggagatcccgtctttcgcgtaggcaaacggcagtttggctaccgaggtcagggaggcgactgcgcctttctggtcacggccgtgcatcgggttggcacctgggccgaatggtgcgccggcgcggcggccatccggggtgttaccggttttcttaccgtacaccacgttggaggtgatggtcagtacggactgggtcggtaccgcgttgcggtaggtgcgcagtttctgaattttcttcatgaaacgctcaaccaggtcgcaggcgatgtcatcgacgcgggcgtcgttgttaccgaactgcggatactcgccttccactttgaagtcgatagccaggccgtcttcgtcgcgaatggtggtgactttcgcgtacttgatggcggacagggagtcggccgccacggacagaccggcgatgccgcaagccatggtgcgataaacgtcacggtcatgcagcgccatcagcgcagcttcgtagctgtacttgtcgtgcatgtagtgaatgatgttcagcgcggtcacgtactgcttggccagccaatccataaagtggtccatgcgcgccatgactttgtcatagtccaacacttcgtccatcatcggcgcttcttttgggccgacctgcattttcagtttttcgtcaacgccgccgttgatggcgtacagcatggttttcgccaggttggcgcgggcgccgaagaactgcatttgtttgccgacgatcatcgggctgacgcagcaagcgatggcgtagtcatcgttgttgaagtcagggcgcatcaggtcgtcgttttcgtactgtacggaagaggtgtcgatggacactttcgccgcgaatttcttgaagttcagcggcagcttctcagaccacaggatggtcatgttcggttccggagacggccccatggtgtacagggtgttcaggaaacggaagctgtttttggtgaccagggtacggccgtcgacgcccataccggccagggactcagtcgcccagattgggtcgccggagaacagctcatcgtactcaggggtacgcaggaagcgcaccatacgcagtttcatcaccaggtggtcgatcagttcctgcgcttgttcttcggtcagtttgcccgccttgatgtcgcgctcgatgaacacgtcgaggaaggtggacacgcggccgaaggacatggcggcgccgttctgggatttcaccgcggccaggtagccgaagtaggtccactgcaccgcttcttgcgcgctggtggccgggccggagatgtcgtaaccgtatttggcggccatctctttgatctgagccagagcgcgatgctgttcagcgatctcttcgcgcagctggatggtcatttccaggtcttcgccgttttccagtttttcctgcagcgatttgaactggttcagcttgtcggccatcaggaagtcgataccgtacagcgcaacgcggcggtagtcgccgatgatgcggccgcggccgtaggcgtccggcagaccggtcagcacgccggatttacggcagttcaggatgtctttggtgtaaacgtcgaatacgccctggttgtgggttttgcggtattcggtgaacacttttttcagctgcggatccagttcgcggccgtacactttgcacgaaccttcgaccattttgatgccgccgaacgggatcagcgcgcgtttcagaggggcgtcggtctgcagacccacgatggtttccagctctttggcgatgtaacccgcgtcgtgagaaacgatggttgaagcaacgttggtgtcgaaatcaaccggcgcatgagtgcggttttccagtttgatcccttccataaccttgtcccacaaggtggtggtggcttgagtagcgccagccaggaaggattcgtcaccctcataaggcgtgtagtttttctggatgaagtcacgaacgttgacttcattctgccagtcacccttgctgaaaccttcccaagcgttggctaatttctcgttaagttcggtcattgtacacctacctttgattgtggatttctaactctgcgcgcggttactcacagcttagtgctgctcgcggcccccgcgcagataaattacccagtaagtcaacccaaccagcagaccaccgccgatgatgttaccgagggtgaccggaatcaggttgtcgatgatgaagttgcttactgtcagatgagcgaattgctcaggtaccgctcctacggcttgccagaattccggcgtggcgaagtgtttgaccacgatgcccatagggatcataaacatgttagcgatgctgtgttcgaagccgctggcgacaaacatcccgaccggcagcaccatggcgagcatcttgtcggtcagggtgcggccggagtagctcatccagaccgccaggcagaccatcaggttggccagaatgccgaggcagacggcttcgatgaaggtgtgatgcagcttgtggtctgcggtttgcaggacattcaggccccactggccgttggcgaccatatactcgccggagaaccagatcagcgccacgaagaacagcgcgccgaccaggttgccgagataaacgttcagccagttggcgcccagctggccccagctgatgcggccgctggccttggcgatgacgataagcacggtagaggtgaacaggtcggcgcccgacaccaccaccagcattaacccgagagagaagcagatgccgccgaccagtttcgccagcccgaaaggcacgccggcggtgccggtggtcgccgtgatgtagaagacgaaggcgatggaaatgaagacaccggcggtgatcgccaaataaaacgttttcagcggatgtttggtggctttatacacgccggcatcttcagcgattttcgccgttgccgcaggtaaaatcagatcgaaggggctgtcagttttcaaactaactctcgctcttaagggttaaaacaacgcaatgagatactagcaaagcagtataggggaaaatttgatttggatcataaggcggggaagtagagcggtgaaatggcttgttttttgtgtggtttttatggttaatttattgatttttaataaaaaacaattttttaatgtttgcaaatttttttgaatccaccgagtggtcggcgtggagtaaagttaaatttttaggcgttttgtcgccgcgcggcgttgaaagtttaattatcggttaattattatttcaccgtccggcaacaattgacggtttatttatttttatggtcgtttaaccacctatttcccggcgaaaaaataaaaccgaatgcgttgaaataaaccgcaaaattgaaaacgccgcaacggagtgcggcgtttggcaacaggggtactcccaaagtggcagtatcccctgatgatgcttaggccttggcccagtggcggcgtttggccgcctgcagcttctcgtaagccgccagcagagcctgatgggccggcagcgccttcagatcggcatcgacggcgaacagcccgttgaagcgctcttcaccgctgatggcggcggaggcggcgtcgaccgcttcctggccgtacatcttcacgaacgcggtatagtactgcgccgcttcgcgttcaggctcctgcgccagcagcagcagcgtttgcaggcagcggtagtagttgctgcgcgccgggctcagcaccgaggcgttgaagtcctgcgtccattcggtccagatcagcgcctgatccagatcgccgcccgccagcgccagcatcgatttcagctcgcccacgcgcagggtataccaggcgttgtctttgccgctggcaatgcccagcagttcgcgtacgcgggtgaaatcgtccagcccttcgtcgtccaactgctcgatcagcgccaggtattcttccggctcccactcgctgcccggcagcgccagcagcgtatcgcgcaggtgcgcgcccatgctgttgttagccagcagcaggtcttccgccgggtagatatcggacatgcccggcacgatgatgcggcaagcgtagacgcccaggtgctcgtagtcggcgatgtacacttccgcgtcttccttgtcgaagatgctcatcagggtggcgaactcttcctgcgtgctgccgctgaagttccagtcaacgaacgggtaatcggcatcctgtttgaacagatcccaggagatcagaccgctggagtcgatgaagtgcgtttccaggttggtgtgttccgccacttcttcgtcatcgaaggtcggcgcggtgaacacgtcgagatctttcaggctgcggccctgcagcagttcggttaccgtgcgctccagcgccacgccgaagtccgggtgcgcgccgaatgaagcgaagcaggtgccgttggtcgggttgaacagcaccacgcagatcaccgggtagttgccgcccagcgaggcgtcataggagaggattgggaaaccttcctcttccagcttggcgatggcttccaccacgcccgggtagcggttcagcacctcgtccgggatcgccggcaggctgatggattcggcgataatgcggtttttcacatagcgctcgaacacttccgacaggccctgcacgcgcgcttcgttggcggtgttgccggcggacatgccgttggaaacatacaggttgccgatgatgttcatcggaatgtataccgtttgctgatctgactgacgggtgaacggcagcgcgcagatgccgcgatcggcattgccggactgcagatcgaccagatcgctggcgctcagctcttgctgcggatcgtagaaggcgtgcagacgttcgtcgaggatgccggccggcagcgcgtcgtcttcagggatcgggaaccatttctcattcgggtagtgcacgaagtcgccttcggcgatctgcttgcccagatagaaatcggcgaagaagtagttggtggacaggcgctcgaaatattcacccagcgcggaggccagcgcggcttttttgctggcgcctttgccgttggtgaagcacagcgggcaatcgcgatcgcggatgtgcaccgaccacacgtgcggcaccgggttcagccaggaggcttcttcgatgttgaaaccgagatcgctcagtttctgctggaaacgggagatggagtcttccagggcggcgtctttaccggggataaaagtttgcgtcattgtcttcactttttgcgcgtactaaaaacgcgcaatgatacggggttttacgctggagctccacgtattcctaaagcggcggcaaagtcacagtttttttaaggataaaggccataattcagcaagttatctgtcacggagaaatctaatgaaatcagtgaaactcagcgcgttaaccctcttgttgaccggtgtcagcgcctcggcgctggcgctgcccaacatcaccctgctggcgaccggcggcactatcgccggcggcggcgattcggcgacgaaatccaactataccgcgggcaaactgggcgtcgaggcgttggtcgatgcggtgccggcgctgaaagatatcgccaacgtgcagggggaacaggtggtgaacatcggctcgcaggacatgaacgatcaggtctggctgacgctggcgaagaaaattgacgccgactgcagcaaaaccgacggcttcgtcatcactcacggcaccgatacgctggaagagacggcctatttccttgatttgacggtgaaatgcgacaagccggtggtgttggtgggggctatgcggccggcgacggcgatgagcgccgacggcccgttcaacctgtataacgcggtggtgacggcggcggatccgcaatcggccaaccgcggggtgctggtggcgatgaacgacaccgtgctggacgcgcgtgacgtcactaagaccaataccaccgccgtgcagaccttccagtcgccaaactacggcccgctggggtatatccacaacggcaagatcgattaccagcgctcgccgcagcgtaagcatacccgggagacgccgttcgacgtcagcaagctgaacgagctgccgaaggtcggcatcgtctacaactacgccaacgcctccgatgcgccagccaaggccctgatcgccgaaggctatcagggcatcgtcagcgccggggtcggcaacggcaacctgtataaaaccgtgttcgacaccctagcgacggcggcgcacaacggcgtggcggtggtgcgttcttcgcgcgtgccgaccggcgccaccaccgaggatgcggaagtggacgacgccaagtacggcttcgtggccgccggcacgctgaatccgcaaaaggcgcgcattctgctgcagctggcgctgacgcaaaccaaagacgcgaagcagatccagcagatgtttaatcagtactgatcgtttcttctcctgcgggggccatccgggctcccgcagccatgttggctgaatacagcataaaacaccgcgttaacccgctgaatttccccatgtcacagggttttatcgtccaaacaatcgcgacggccgcagagcctgtcatcacccggcacggccgtttgccgccgacgggcgaataagcgttgcagccatggggcgtgagtgataaaaccgatgggttggttaacgcgagcgttaacttcgggcgtcttttcgacaggtcgcttttctgcggcgaacagtgaatgtggtgaggggaaatgactcaggtttataattttagctctggcccggcgatgctgccggtggaagtgttgcgtcgtgcggaacaggaactgtgcaactggcacggcctgggaacgtctgtgatggagatcagtcaccgcagcaaagaattcatcgccgttgccgagcaggcggaacaggatctgcgcgatctgctgaaagtcccctccaactataaagtgctgttttgccacggcggcgcccgcgcgcagttcgccgcgctgccgctgaacctgctgggcgacaaggccaccgccgactatatcgacggcggttattgggcgcacagcgccatcaaggaagcggaaaagtattgcgccccgaacgtcatcgacgtgaaaacccgcatcgacggcctgagcggcatcacgccgatgaaagagtggcaactgagcaacgacgcggcttacgtgcattattgcccgaatgagaccatcgacggcgtggccatcgatgaaacgccggacttcggcgacaaagtggtgatcggcgattactcctcgaccatcctgtcccgcccgctcgacgtcagccgtttcggcgtgatttacgccggcgcgcagaaaaatatcggccctgccggcctgacgctggtgatcgtgcgcgacgatctgctgggcaaggcgcgcaaagaagtgccgtctatccttgactacaccgtgctggccgagaacggctcgatgttcaacaccccgccgaccttcgcctggtacttgtccgggctggtgttcaaatggctgaaagagcagggcggcctggtggagatgcaaaaacgcaatcaggccaaggccgagctgctgtacgcgaccatcgataaatctgacttctaccgcagccaggtggcgatcgccaaccgttcctggatgaacgtgccgttccagctggccgatgcggcgctggacaaggtgttcctcagcgaagccgaggctatcggcctgcaggcgctgaaaggccaccgggtagttggcggcatgcgcgcttctatttacaatgccatgccgctggccggcgtccaggcgctgaccgacttcatggccgacttcgaacgtcgtcacggttgattccggcagcccgccaggcgcgggcggcctcaggctgttgtccttttgcattaaagcggctccggcattattccggagccgtttcgtttatcagaattggagagttttgttcacatggtggattccctgacgttacaaccggtcgccctggtcaatggcaccgtcaacttacccggctcgaagagcgtttctaaccgcgctctgctgctggcggcgctggcggagggaacgacccggctgaccaacctgctggacagcgacgacgtgcgtcatatgctgaatgcgctgcaggcgttgggtgtgaactaccggctttccgccgaccgcaccgagtgtgaagtgaccggcgtggccgggccgttggtggccaaccaaccgctggaactgttcctcggcaatgccggcaccgcgatgcgcccactggcggcggcgctgtgccttggtgaaggcgacgtggtgctgaccggggaacctcgcatgaaagaacgcccgatcggccatctggtggacgcgttgcgccagggcggggcgcagattgattacctcgaacagaccgattacccgccaattcgcctgcgcggcggtttccagggcggcgacgtcaccgttgacggcagcgtttccagccagttcctgaccgcgttgctgatgaccgcgcccctggcgccgcaggatacgcagatccacatcaagggcgagctggtttccaagccgtacatcgacatcacgctgcatctgatgcgcaccttcggcgtatcggtgagccacgacaactaccgggtattccatatccaggggcgccagacgtatatcgcgccgggcgattacctggttgagggcgacgcttcttccgcctcttacttcctggcggcggcggcgatcaagggcggcaccgtgcgcgtgaccggcatcggtcgcaaaagcgtgcagggcgacaccaagtttgccgacgtgctggagaaaatgggcgcgcgcatcacctggggcgacgatttcatcgagtgcagccgcggtgaactgcgcggcatcgacatggacatgaaccacattcccgacgcggcgatgaccatcgccaccgcagcgctgttcgccgaggggccgaccaccatccgcaatatctacaactggcgggtgaaggagaccgaccgtctggcggcgatggccaccgagctgcgtaaagtgggggcggaagtggacgaaggcgaagactacattcacgtcgtgccgccggccaagctgcagttcgccgagatcggcacctacaacgatcaccgcatggcaatgtgcttctcgctggtggcgctgtcggatacgccggtcaccattctcgatccgaaatgcaccgcgaagaccttcccggattatttcgaacagctggcgcgcatcagccagccggcgtaacccgtcaaatcgtttattttaaggcccctttgcgggcctttatcgtttttaacctttggcgaccggcgtttcttctatactttttcgcggttgtgcgcttattttcaacaaccggatagttccagggtaacagatcgccgtagggcagcgtataatacgccaccgtatttgcccctgattgggcaggtgacagagctcacgggcttcgagtcgaagcacgccgtgtctctgtgaggttttctacctgaaggagagagaaatgacggctacagccccggtgataaccgttgatggaccaagtggcgcgggcaaaggcacgctgtgtaaagcgttggccgagtcccttggttggcgtttgctggactccggcgcgatctatcgcgtgctggcgctggcggcgttgcatcatcaggtggatatcacttctgaggaagcgctggttccgctggccgcacatctcgatgttcgcttcgttgcccaggacggcaagctgcaggtgattttggaaggtgaggacgtcagcaatgagatccgcaccgaaaccgtcggcaacaccgcgtcgcaagcggctgcgtttccgcgcgtgcgcgaggcgttgctgcgccgccagcgcgcattccgtgaggcgcccggcctgattgccgatggccgcgacatgggcacggtggtgttccctgacgcgccggtcaagattttcctcgacgccagctcggaggagcgcgcgcaccgccgcatgctgcagttgcaggagaaaggctttaatgttaactttgaacgtcttttagccgagataaaggaacgggacgaccgtgaccgtaatcggcctatcgcgcctctggtgcccgcttctgacgccctcgtgctggattctaccagcatgtcgatcgaagaagtgatccggcaggcgttgacgtatgcacagaaagtgttggcgttgccgcagcaataagcgcggcggcgctattggctttttgtcatatttgtcatagcggtatcgcaatatatcgggtaaaattttacccctgtaaccttaaaccctgtcggcatggagccaatggcggggtatgtgaaacaaccccattcggcgggacgctaaatggacgttaaactaaagaaccctgaagattaacaacatgactgaatctttcgctcaactctttgaagaatccttaaaagaaatcgaaacccgcccgggttccatcgttcgtggcgtcgttgttgctatcgacaaagatatcgtactggttgacgccggtctgaaatctgagtctgccatcccggctgagcaattcaaaaacgcccagggcgagctggaaatccaggttggtgacgaagttgacgttgctctggatgctgttgaagacggcttcggtgaaaccctgctgtcccgtgagaaagctaagcgtcacgaagcttggatcacgctggaaaaagcctacgaagaagctgagactgtaaccggtgttatcaacggcaaagtgaagggtggcttcaccgtcgagctgaacggcatccgcgcgttcctgccaggttccctggttgacgtgcgtccggtacgtgacactctgcacctggaaggcaaagagcttgagttcaaagtcatcaagctggatcagaagcgcaacaacgttgtcgtttctcgccgtgcggttatcgaatccgagaacagcgctgagcgcgatcaactgctggaaaacctgcaggaaggcatggaagttaaaggtatcgttaagaacctcactgactacggtgcattcgttgatctgggcggcgtagacggcctgctgcacatcactgacatggcttggaaacgcgttaagcacccaagcgaaatcgtcaatgttggcgatgaaatcactgttaaagtgctgaagttcgaccgcgagcgtactcgtgtatccctgggcctgaaacagctgggcgaagatccatgggttgctatcgcgaaacgttacccagaaggcaccaagctgactggccgtgtaaccaacctgactgattacggctgcttcgtagaaatcgaagaaggcgttgaaggtctggtacacgtttctgaaatggattggaccaacaaaaacatccatccgtccaaagttgttaacgtgggcgacgtagtggaagtgatggttctggacatcgatgaagaacgtcgtcgtatctccctgggcctgaagcagtgcaaatccaacccatggcagcagttcgcagaaacccacaacaagggcgaccgcgttgaaggtaaaatcaagtctatcactgacttcggtatcttcatcggcctggacggcggcatcgacggcctggttcacctgtctgacatctcctggaacgttgcaggcgaagaagcagtacgtgaatacaagaaaggcgacgaaatcgctgctgttgttctgcaagttgacgcagagcgcgagcgtatctccctgggcgtgaagcaactggctgaagacccgttcaataactacctgtctatgaacaagaaaggtgctattgttactggtaaagtcactgcagttgacgccaaaggtgctacagttgaattggcaggcggcgtagaaggttacctgcgtgcatctgaagcctctcgcgaccgcattgaagatgcaactctggttctgaacgtaggtgacgaagttgaagctaaattcaccggcgttgaccgtaagaaccgcgttgtaagcctgtccgtacgtgctaaggacgaagctgacgagaaagacgccatcgcaactgttaacaacaaacaggaagaaggcaacttctctaacgcaatggctgaagctttcaaagcggctaaaggcgagtaatgacggggggcggtcgctgaccgccccaatacggtagtttagctgcaaagcttggaggtactatgaccaagtctgaacttattgaaagacttgctggccagcaatctcatattccggcgaaggccgttgaggatgcagtgaaagagatgcttgagcacatggccgctacgctggccgagggcgaacgcattgagatccgcggattcggcagtttttctcttcactaccgtgccccgcgtgtaggccgcaacccgaaaaccggtgacaaagtcgagctggacggcaagtacgttcctcacttcaaaccaggcaaagagttgcgtgaccgcgccaatatctatggctagtcgctgactgatcatagcgttgttgcttgtaaagaatataaaacggtgcctgtaaggcgccgttttttttcgcctgcgattctccacgatacgcttgtgaattgcgtactgcgccgcatttgcggtgtagttgctgcataaacctctcttaccctggcgcgctcgccgcattctcgctaaagcccgctggtcgcgacatgccgcttgactcatcctgtttgcctgccgtaacgcgcttgtgcgcgtggcgggtgcgatgggagaagaacgatcaaaatttcgctggatctggcgatattcgccgttatctgcggcatcttgccgctgctgattttaccgcagttgccagaactatggctgctgtggccgatgctgtttgtcggctgcttgctgttgcgcgcgcgttggccgttctgccgctatttggcctgcctgggattgggattcacatgggcggttttcaacgccggaagcctgctcgggcaaatggagcgcttaactcgcatgccggacgtgacggcggtggtgcaggtgagcagcgtcgcgctggagcccgccgccagtaaacagacgctgatgcgcatcgagcgggtcgacggtcattggttggcgcctgcgctggcgtttaccacgacgtgggctcccgaacggcagcggctgtgtgccgggcagcgttggcaattgaaactgcgcctgcggccggtacatggcaagctcaatgaaggcggatttgacagccaacgttgggcgattgcccagcgccagccgttgacggggcgggtcaggcaggctcgtttgctggatggcgactgcgggctgcgtcagcgcatcatcagccatgcggaaactaacatcggtgaattgcgttacaaggcggtattgctggcgctggcgtttggggaacgaaccgcgctggagcaggctttgcgcacgctgatgctgaaaaccggcatcgctcacctgatggccatttcagggttgcatgtggcgatggtcgccattttgttctgggccgcgttgcgagcgctgcagttttttcttcccgcccatttgattggctatcgctttccattggtcgcaggctgggtggcgacgctgatctatgtttggttggtgggcgcccaaccgccggcggtgcgtaccgcgttggcgatgacgctgtggatgctgttgcgcttgcgcggcgttcattgttcttcctggcaagtgtggctgtggtgtatcgggctgattttgctgtgcgatccgttggcggttttgtcagacagtttttggctgtcggtgctggcggtggggtgtttgattttttggtttgaatgggcaccgctcagcgagcgatttcgctcggcctggtattgggcgccggtacgctggctgcatattcagttgggcatgacgttgttgctggtgccgatgcaggtcgcgctgtttttaggcctgacgctgacctcgctgcctgccaatctttgggctgtgcccatcgtctcattggtgacggtgccgttgattttgctggcggtgatcggcggcgtcttcccctcgctaagttacgggctttggtggttggcagatttcacgttgagcggggtgtttgtgccgctgcattacctgcaacgcggttgggtggatttgggggccgcctcgctgctggccagcatagcgggatggcttatcgttatctgctggcgctttcattggtggtggcgctatgcgccggggctggcggcggtggcgatatgctgcgtgttgtggcgtggcaaagcgccggactatcgctggcgtgtcgatatgcttgatgtcgggcacgggttggcggtggttatcgagcaaaacggcaaggggatactgtacgataccggcgatcgttggcccacgggcagcgctgccgaacggcatatcttaccgatgttgaactggcggaatattgaactggagcagatcattatcagccatattcacctcgatcatatcggcgggctgccggtgatgcggcgggcgtttccgcaggcgacggtgcgcagcccgatacgcggggaaggacacttgccctgcatcgccggggagcgttggcgctggcaatcgctgcaattcgaggtgctgtggccaccgaaaacgcgcaaaaggccggtcaatgacgactcctgcgtgatccgcatcgacgatgggcaattcagtttgctgctcaccggcgatgcggaaaagcaggcggaggcgcagctgttacggttgcggcgcgatcgcttggcggctacggtgttgcaggtggggcatcacggcagcaagacgtcctcgacgccgccgtttctgcgcgcggtcaatcccgaagtggcgctggcctccgcatcgcgttacaacaaatggcgattgccggcgcggaaagtggtcgccagataccgggcaaatggcatccaatggcgcgatacaacgcgctcgggtcagttatcggtactttttttcgacaacgattggcaaattaaaggctttcgcgaacaattaatgccccgttggtaccatcagcggtttggcgtagagggtgataatgagtaaaataggccgctatttcttccgatgctggtatttgcatgatgaatgataaagatctctcgacctggcagacgttccgtcgactctggccgatgatcactccttttaagaccgggctgattgtggccgccattgcgttgattatgaacgcagcgggggacacgctgatgctgtctctgcttaaaccgctattggacgatgggtttggaaaaaccgacagcagcgtgctggtatggatgccgttggcggtgattgcgctgatgttgatgcgcggcgtgaccagttttgtttcaagctactgcatttcctgggtttccggcatggtggtgatgcaaatgcgccgccgcctgtttggccacatgatgagaatgccggtggccttcttcgatcagcagtccaccgggactttgctgtcgcgtattacctatgattccgagcaggtagcttcctcctcttccagcgcgctggtgaccgtggtgcgtgaaggagcctcgatcattggcctgttcatcatgatgttttactacagctggcagctgtcggtgatcctgatcgtgctggcgccgatcgtctccatcgccattcgcctggtgtccaagcgtttccgcaacatcagcaagaacatgcagaacaccatggggcaggtgaccaccagcgccgagcagatgctgaaaggccataaagaagtgttgatcttcggcggccagcaggtggaaaccgagcgttttaactcggtgagcaaccgcatgcgccaacagggcatgaaactggtctccgcgtcttcgatttccgatccgatcattcagctgatcgcttcgctggccctggcgttcgtgctgtttgccgccagcttcccaagcgtgatggaaaccctgaccgccggcaccattaccgtggtgttctcgtcgatgatcgcgctgatgcgtccgctgaagtcgctgaccaacgtcaatgcccagttccagcgagggatggcggcctgtcagacgctgttctccattttggatatggaacaggaaaaagacaccggcacccgcgaagtgaagcgtgcgaaaggcgatatcgaattccgcaacgtcaccttctactacccggccaaagaaacgccggcgctgcgtgatatcaacctgaaaatctccgaaggcaaaaccgtcgcgttggtgggccgttccggttcgggtaaatccaccatcgccaacctgctgacgcgcttctacgatattcaggaaggcgaaatcctgatggatggccacgatctgcgtgaatataccctggcctcgctgcgcaatcaggtggccctggtttcacaaaacgtgcacctgttcaacgacaccatcgccaacaacatcgcctatgcgcgcgagagcgaatacagccgcgagcagattgagaaagcggcggaaatggcgtacgcgatggacttcatcaacaagatggaaaacggtctggatacggtgatcggtgaaaacggcgtgatgctgtccggcggccaacgccagcgcattgccatcgcgcgtgctttgctgcgcgattgcccgatcctgatcctggatgaggcgacgtctgcgctggataccgaatccgagcgtgccattcaggccgcgctggacgagctgcagaaagaccgcacttcgctggtgatcgcgcaccgtctgtcgaccattgagaaggcggacgagatcctggtggtggaggacggccgcatcgtcgaacgcggtgaacacgccgagttgcttgagcgccagggcgcctatgcgcagctgcaccgcatgcagtttggtcaataatgattgagcgcatctggtccggcggttcgttgctttatctggcgctattgccgctctcgtggctttatggcttgttcagttggctgatccgtctcagttaccgctgcggcctgcgtaaaagttggcgttcgccggtgccggtagtggtggtgggtaacctcaccgccggcggcaacggtaaaacgccgatggtgatttggctggtggaacacctgcaacaacggggctatcgcgttggcgtggtgtcacgcggctacggcggcaagtcggcggtttatccgctggtgctcggtcagaatacgtcgacccgcgaggcgggcgatgagccggtgctgatttatcaacgtaccggtgcgcctgtggcgatcgcgcccaagcgagccgaggcggtgcaggccctgctgcaacaacagccgctggatgtgatcatcaccgacgacggcttgcagcactacgctttacagcgtgacttcgagctggtggtcatcgacggcgtgcgtcgtttcggtaacggctggtggttgccggccgggccgatgcgtgaacgtgccgcgcggcttggcagcgtcgatgcgcgcgtcgccaatggcggcgtggcgcaggccggggaaattgccatgcgtctgcaggcgcgtgatgcggtgaacttgctgagcggtgagcgtcgcccggcggccgagctgccgcgcgtggtggcgatggcgggtatcggccatccgccgcgtttcttcgcgacgttggaaaagttgaacgtcgaagtcgtgcaggaagtggcgtttgccgatcatcaggaatatcagcaggaaccgctggcggcgttggttaatgcagatcaaacgctgttgatgacggagaaggacgcggtgaagtgtcgcgcctttgcccagcccaattggtggtatctaccggttgatgcggtgctaccgtccgctcaggctgagcaactgctgcaggatatcgagtccctgctgactaagtaatctcaggatgccagcgtggcaagccccagggcttgcgcgcaggcttccagcgaacgctgctgggtttgctgatacagcgccagctcgtcgatcacctcactgcccaacgcttgttcaaacgctgcccggctggaaaccgcgttgtactgcgcgtggcggctgtcccccagattcgactggaaaatccccgccgcgctgaccggcagaaaatcttcatacaccagaggctggaagcgaacgtgttctttctcgatcagctgttccagggtgctgtgcttgtccagcgactctttggccgccaggccgcattcggtcgggaaatagcggaaccaggctagctgttgctcacgcagcgtggcgtaatcatccggaaacgcccggaagttttcctccagcagttgatagtagcgctcggcattcttctcgctcggcggcgcctgcaacgcatcgttggtcgcctgcagcaaacggtcgtaaagttcgcgtcctttaggcgttagcgccacgccgcgttgttcgatctcgccgaagcgcgcggtatggtgaccggcgatggcgtggccgtcgtgctcaacgaaatcgacgctttcttccaacgctttgaagctggtttggcgcagcaggatcgcgcggcggcggcgcggcgggccctcgatgaccgctttgggcgtaataccgcggccgggcatcgcttgctgaacgcgatcgatatccagcgtacgtggtgtcaggtggttgatatgcggccctttaaacgccaccacgtcggcgatcaggcgatgctgatcgtgcaactgccggtattcttcggcgctgaccgtcgcctggttatgccagcggaaggtttccagcgcttgttcgacaaattcttgcgcctgcacttcattcagcccgccttgcgcttcctgcagcgccatcagctccagcgcgcgatcggtaaagatacggcggcgcgccagcaagcgctcggccagcgcacgcagcgcgggatcttctatcagttccaggcgcagcagggaggtgaacacgcggaaaggactgatctgcagcgcgtcttcgtgtatggcgcgaaaagcggtggagtgcaccggaacgcccgccaccgacaggtcatagtaaccgaccggcgccatgcccatcacccggaacaggcggcgcagggtggccagttcgtccgccgtgccgacccggatcgcgccgtggcgctccatggccaggcgttcgatctcgccggtgatttgcagttgatgagccagtgcggcatcttcgcgtagaacctgccggttggtttccgccaccagctccagcagatcgccgtacagcggtacctctttttgatacatgtccgacatcgcgtgagagaatctggcgcggatttcattaggtgaaacgaactgctgggcggtcatgcgcatagctccttgattcagcataatctgaaaaatcgtgtttttagcggcaaaagtgctggcgaaaaagccgtctgccttgttttcccctcaagtttagccatctgatttgggatttgttatagcggcgtcaagcatattagagttttatgcgttagctctcatttgcagcgctcagacgggcaaatgatgccccggtgaggagaggaacgcgctggatcggctgcggcgagcgttaaattaagtcatgtatattcatggggataaaaataaattcggtgtaatgatgaatttattgcaataaacctcttgtgcattcaccatttttatgagtaaatgcaagtcggcctgtaatccagacctatttatgttcgagtttagagttaagcagttcctccaaaaacgttatcatccgattccgcttcaaagacgaaccttctaagtacctcccataagtaatgtttctgaaatggccgcaattgcctcttatggcaggttttgtaaatatatttaaaggtaaaagtaatgtctaagaagactggtcaagttaagtggttcaacgaaagcaaaggttttggtttcattgagcagcacgacggcggcaaagatgtattcgtacacttctccgcaatcatgaccgacggtttcaagaccctggctgaaggccagcgcgtcgagtacaccatccaggacagcccacgcgggccggctgccgccaacgtagttgctctgtaagaagacagggaacgcgtataaagagatcttaatacaaccatggtgacgcttcagcgctgagtcatgcggaagatattaagttcaacaagcccgccttagtgcgggttttttatttttttgctcacgagaggtttgttacgaaaaactttaggatgggctggtagcgtccagacaatataaaaaatgacgttgtcaaggatgctcaagtaaaaggatataagttatgtttaaaaatactgtgttaaaaatgggtcgtgtgaaatggtttaatcaggccgaaggctatggttttatttcaccggtagatggcagcgacgaaatctatgtcaaccgcaacgctatcgccaacaccaaaaataagtcgttgaacgaaggtcagaacgttgagttctcgatctatcgcagctcgcatgggctgtccgcggcagacgttatcgcgttctgatcgcatcctccttcctcgccagtgccggtgtcgccacccgcaagcactggcgaagataaatcccgcgatatccactattatcaggccattgcctactcgccacggatatcaggatgaccaccccgaccatttcccttaccgccgctcgcgcactgcaccttgccgcccaggggctgctttctccgcttaaacgccaggctcggcccgatgatgtcgtgagcgcgatccagcgcatggggctgttacaaatcgataccattagcgtcgtcgcccgcagcccgtatctggtgctgttcagccgtttgggggcctatcagccggagtggctggagcaggcgctcgccggccgcaagttgttcgagtattgggcgcacgaggcctgtttcctgccgatcgaggattttggtctgttgcggcatcgcatgctggcgccgcatgatatgggctggaaatactcggccgactgggtgcagcagcaccaggcggcgatggacaacctgctgcggcatatcgaacaacaggggccggtgcgttccgccgatttcagcgccgagaagaaaggcaacagcgggtggtgggactggaaaccggagaaacggcacctggagatcctgtttaccgccggcaagctgatggtggccgagcgtcgcaacttccaccgggtttacgatctgaccgaaaggctgctgccggcctgggacgatgcgcgtcatgcgctgcctgcggagcgggcgcgccggcagatgttgcatcgcacctgccgctatctgggcattttccgcgccgagtggttggcggattattatcggctgaaacgcgtggcgccaaaagccttgctggcagagctgcaggcgcagggggaaatttcgccggtgcaggtagaggggctggaagggcagttctatgtgcatgaatcactggcggaactgctgccgctggcggagcagggcaaactgaaatcgacggtcaccagcctgctgtcgccttttgatccggtggtgtgggatcgccgccgggcgctcgaactgttcaactttgactatcggctggagtgttacacgccgaaagaaaaacgtcgctatggttacttcacgttgccggtgctgcatcggggcgagctggtggggcggattgacgccaaggcgcaccgtcgccagggcatcttcgagatcatcagtttccatgcggagccgcaggtgcgcttcggtaaacagcgagcgcaggacatccggcaggccatcgcgcgcacggccaaatggcacggtgcgcaacgcgtcgcgctgggcgacattccggccgcgttggccgcggaatggggtgccggctgggaagtgggataacgagcgacgccgtcggtggggtaaaacgaagtgaagcgtcgctcgttacaaaggggctcagtggctgaagttagcgaacagagcgatgattttatgcagacgtttgatcatgtatcacggcttttttgtgatttgtgtcacaaaattctacgccgggatgcgccgcagttcaagctgtcgcgctgacgcagtgaggaaatatcggcaccttggcgccgccgatgattaacctgaggccgggcgttatgctatcctcactgcctttcccagatgacctatcccctagcggaggatgcatggaccaccgtttactcgaaatcgttgcctgcccggtatgcaacggcaaactctatttcaataaagaaaaccaggaactggtgtgcaaagcggatgggttggcttacccgctgcgtgatggcattccggtgctgttggaaaatgaagcgcgtgcgctgtcgctggatgagaagcacgcatgagttttatcgctattattcccgcccgctatgcctcaacccgtttgccgggcaaaccgctggccgatattcacggcaagccgatggtggtgcatgtgatggagcgcgcccgtgagtccggcgctagccgcgtcatcgtggcgaccgatcatcctgaagtcgccaaagcggtggaagccgccggcggcgaagtgtgcatgaccagcccggatcaccattccggcaccgagcgtctggcggaagtgatcgcgcactacggctttgccgacgaccagatcatcgttaacgtgcagggcgatgagccgctgatcccacccgttatcgtgcggcaggtggcggaaaacctggcgggcagccaggccggcatggcgacgttggcggtgccgatcgagagcgccgaagaggctttcaaccccaatgcggtgaaggtggtgatggacgcgcagggctacgcgctctatttctcacgcgccaccattccgtgggatcgcgagcgtttcgccgcgtcgaaagagagcatcggcgacagcctgctgcgtcatatcggcatctacgcataccgcgcgggcttcgtgcgccgctacgtcagctgggcgccgagccaactggagcagatcgagctgttggaacagctgcgcgtgctgtggtacggtgaaaagatccacgtggcggtcgcgaaagcgatcccgagcgtgggggtcgatacgccggaagacctccagcgcgtgcgcgacagcattcaaccctgagcctgatttcgtcggcgcgccgcgcaacgcgccgacgatgcaatacccccattattgatccccgttttgttgatctgcgttgaagaatttttccgctcgccgttcgatgatgttacgcatcccccctaattagcctgaggtgaatgccttatggagcagttacgcgccgaactgagcattgtgctgggtgagtccatcagccggctggagcgggtgagcgaacagccttatgcgcatatgtattcgctgtacgatcggcagggcaacgcgatcccgctgatggcgaaaagctttatctgtcggggcatcgcccagcaggaggcgtacaagctgtcgatgctggcgcgcgacggggatattcgcctgcctacggtgtatggcgtggtgtgtacccaccaggcgccgtatacggaaatcctgctgatcgagcgcctgcgcggcgtgtcggctgaggcgccgacgcgctcgccggatcgctggaatatgctgatggagcagatcgttgacgggatattggcctggcaccgcatcgacagccacggcagcgtcggcagcgttgacagcacgcaggagaatgactggttttgctggtatcaacagcgggtcgaagtgctgtgggcgacggtggtcaatctcaccaccccgcagttgaccatggcggatcggcgtttgctgtaccgcacgcgcgaagcgctgacccatttcttcgtcggcttcgatgatccctgtgttctggtgcacggtaacttatcgctgcgcagcatgctgaaagatcccaaaagcgatcaactgctggcgatgctcaatcccggcgtagtgctgtgggcgccgcgcgaatacgatcttttccgcctctgcgaggcgggcatgcccagccagctgctgttcagctatctgcagcgggcgccggtcgccgacgctttcctggcgcggcgctggctatatgtggtgtgggaagcggtagggcgtttgatccataccggcaagctggagcggcggccgttcgactatgcgtcgcaacagctgctgccctggctggccggttgaacgagctttactctgcgccggcgctatctgcgcccttcagccattgccacagactacccagcgtttcataccacgcgcgctcggtatggccgaggaacattgacgacggtgtggcgcgatcccagatattcagcggcgagtcgatcgctaactggttggccggcgccgggatcgggtgcagccccttagccttgaagaaacgcatggcgcgcggcagatggttggcggaggtcaccagaatgaacggttgctcgccgaccaatttggcgacctgagcggcctcttgctcggtatcgcgcggttcccccaagatcaccatatcactgcgcggcacgcccaggctttcggccaccagcgccgcagtggcggcgttgctttgcatggggccggcggacgcgccggtgaacaccatcctggcgccgggatgtgcaaggtagagccgcacgccttccgtcacgcgcggcagactgttgccgagcaggtttgaactgggcgcccaatcgggattgtaggtataacccccgcccaacacgacgatgtagctgaccggatcgttaccgcgataagtctggtattcggcctcgatcggccgcagcagccggtcggccaccggttgcaggctgaaaagcagtaaaaacagccagctcagcgtgaaaatcgtcttaccgcttttttgccagcgggtgaaccacagcagcagcagcgccagccccatcagcagcatcaacagcggcagtggcatcagcagggcgccaaagaactttttcaggttgaacagcatcgaaaatcagatccttttgggtgaaaaagcggcatccaggtataaacaggccgcaagaagatacattctaagtcagtctgtgccaaaatagcaggtttgaatgggcgtgcgctttgccgccgacaagaatgagatcagcggagccgttgtccatgcaggatcgcaattttgacgatattgctgaaaaatttgcgcgtaatatttacggcaccacgaaaggaaaaatccgccaggcggtggtttggcaggatctgaccgggctgctggcgcagttgccgcagcggccgctgcgcattctcgacgccgggggcggtgaaggccatatggcctgccaactggcagaattaggacatcaggtgttgttgtgcgatctttctggtgagatgatccagcgcgccgcgcagctggcggagcagaaaggtgtgagccagaacatgcaattcgtacaaagttctgcgcaggatatcgctcaacatttggaacagccggttgatctgatattgtttcatgcagtgcttgaatggatcgccgagcccgaagcggcgctgcaggcgttgtatgactgcctgacgccgggcggcgcactgtcgctgatgttcttcaacgccaacggcctcttgatgcgcaacgtggtgttgggtaatttccaactggtggatcccgaggtcagacggcgccgcaagcgttcgctgtcgccgcaatatccgcacgatccgctattggtctacggttggttggaacagctgggcatgcgcatcggcggcaaaaccggcgtgcgggtgttccacgactatctgcagagcagacagctgcaaacacaaaaatttgaagagttactggcgcttgaacagcactattgccggcaggagccgtacgtgagtttggggcgctatattcacgtcatggcgcataaaccaaacctgaaggacgaactatgagtgaattttcccagacagtacccgaactggtcgcctgggcacggaaaaatgatttctctatttcgctccctacggagcgtctcgcatttctgctcgccatcgccaccctgaacggcgaacgactggacggcgagatgagcgaaggtgagctggttgatgcatttcgccatgtcagcaagggttttgaacagacgcatgaaacggtggcgatgcgcgccaacaatgcgattaacgacatggtgcgccagcgcctgttgaaccgctttaccagcgagctggcggacggcaacgcgatttaccgcctgacgccgttgggtatcggcattaccgattactatattcgccaacgcgaattctccacgctgcgcctgtcgatgcagctgtcgatcgtggcgcaggaactgaagcgcgccgccgacgccgccgacgaaggcggcgacgatttccattggcaccgcaacgtgttcgcgccgttgaaatattcggtggcggaaatcttcgacagcatcgacatgacccaacgcgtgatggacgagcagcagcagagcgtgaagaacgacatcgcggcgctgctgagcaaagattggcgggcggcgatctccagctgcgagatgctgctgtcggaaacctcgggcaccctgcgcgagctgcaggatacgctggatgcggcgggcgataagctgcaggccaacttgctgcgcatccaggacgcaaccctcggcaacgtggagctgggtttcgttgacaagctggtgttcgatctgcaaagcaagctggatcgcatcatcagctggggtcagcaggcgatcgacctgtggatcggctacgatcgccacgtgcataaatttatccgtaccgctatcgatatggacaaaaaccgcgtgttcgcccagcgcctgcgccagtcggtgcaaacctatttcgaccacccgtgggcgctgacccatgccaatgccgatcgtctgctggacatgcgcgacgaagaactggcgctgcgcagcgatgaagtgaccggggaactgccgccggatctggagttcgaagagttcagcgagattcgcgaacagctggcggcgatgatcgaagaggcgctgaaggtgtaccaggaacagcagatgccgctcaaccttgcagcggtgatgcgcgattatctggcgcaatatccgcgtgcgcgtcatttcgacgtggcacgtttagtggtcgaccaggctgtgcgcctcggtgtggctgaagcagatttctcagggttgccggcggaatggcaggcaatcaatgattacggagccaaggtccaggcccatgtcatcgacaaatattgaacaagtaatgccagtcaagctggccaaggcgctgtccaactcgctgtttccggcattggatagccaactgcgcgcgggtcgtcacatcggtatcgatgagctggacaaccacgcctttttaatggatttccaggatgagctggaagagttttacaaccgttacagcgtcgagctgattcgggcgccggaaggtttcttctatttgcgcccgcgctccaccacgctgatcccgcgttcggtgctgtccgagctggatatgatggtgggtaagatcttgtgctacctgtatctcagccccgagcgcctggcgcacgagggcattttcagccatcaggagctgtacgacgagctgctgagcctggccgatgagaacaagctgctgaagttcgtcaaccagcgctctaccggttcggatctcgatcggcagaagctgcacgaaaaggtgcgcacctcgctgaaccgtctgcgccgcctcggcatggtctatttcatgggcaatgacagcagcaagttccgcattaccgaggcggtgttccgcttcggcgccgacgtgcgcagcggcgacgatccgcgtgaagcgcagctgcgcatgattcgcgacggcgaggcgatgccggttgaaaccagcctgtcgctgaacgatgagaatgacgctgaggatcagcaggttgataacgctcctgacggtgcagaggatgaacaggaatgattgaacgcggtaaatttcgctcgttgacgctggttaactggaacggcttcttcgcccgcacctttgatctggatgagctggtgaccacgctgtccggcggtaacggggcggggaaatccaccaccatggcggccttcgtcaccgcactgatccccgacctgacgctgctgcacttccgtaacaccaccgaagcgggcgccaccagcggctcgcgcgacaagggcctgcacggcaagctgcgcgccggcgtgtgttactccactcttgacgtcgtcaattcacgccaccagcgcgtggtggttggcgtgcgtctgcagcaggtggcagggcgcgaccgcaaggtcgatatcaaaccgttcaccattcaggggctgccgaccgcggtacagccgactgaattgctgacccagaccgtgggtgagcgccaggcgcgcgtgctgtcgctgcaagagttgaaagagcgcgtggaagagatggagggcgtgcagttcaagcagttcaactccatcaccgattaccactcgctgatgttcgatctgggcgtgatcccgaaacgcctgcgttcgtccgccgatcgcagcaagttctaccgtctgatcgaagcgtcgctgtacggcggtatctccagcgccatcacccgctcgctgcgtgattacctgctgccggaaaacagcggcgtgcgcaaggcgttccaggacatggaagcggcgctgcgcgaaaaccgcatgacgctggaggcaatccgcgtcacccagtcggatcgcgacctgttcaagcatctgatctccgaggccacttcctatgtggcggcggactatatgcgccacgccaacgaacgccgcatccatctggacggcgcgctggcgctgcgcagcgatctgttgggcagccgcaagcagctggccgccgaacagtatcgccatgtggaaatggcgcgtgagctgagcgagcagagcggcgccgaatccgatctggaaaccgattaccaggccgccagcgaccacctgaatctggtgcagacggccatgcgtcagcaggagaagatcgaacgctatgaagccgatctggaagagctgacctaccgtctggaagagcagaacgaagtggtggccgaggcgagcgagcagcaggccgaaaacgaagcgcgcgccgaagcggccgagctggaagtggatgagctgaagagccagctggccgactaccagcaggcgctcgatgtgcagcagacccgcgccattcagtaccagcaggcgctgcaggcgttggagcgcgcacgcgcgctgtgccaactgccggacctgaccgccgataatgccgaacagtggctggataccttccaggcccgcgagcaggaggcgaccgaagcgctgctgatgctggaacagaagctgagcgtggccgacgccgcgcacggccagttcgagcaggcctatcagctggtgggtaaaatcgccggccaggtcagccgcagcgaagcctggcagtgcgcgcgcgaattgctgcgcgactggccttcgcagcagcacttagccgagcgcgttcagccgctgcgcctgcgcctgagcgaactggaacagcgcctgcgctcgcagcaggatgccgagcgcctgctgcaagaattttgcaaacgccatggccaagagtaccagccggacgatctcgacatgctgcagcaggagctggaagagcgcctggaagcgctgtcgcagaacgtcagcgaagccggcgaacgccgcatggagatgcgccaggagctggagcagatccagcagcgcatccgtgagctgacggcgcgcgccccggtgtggctggcagcgcaggacgccctgagccagctcagcgatcagagcggagagccgctggaaaacagccagcaggtgactgaatacatgcagcagctgctggagcgtgagcgcgaaaccactgtcgagcgcgacgaagtggcggcgcgcaagcgcgaagtggaagcgcagatcgaacgtctcagccagccgggcggcgcggaagatcaacgcctggtcaccttggccgaacgtttcggcggcgtactgctgtcggaaatttacgatgacgttaccatcgacgacgcgccttacttctcggcgctgtacggcccttcgcgccacgccatcgtggtgccggatctgtcgctggtgcgcgagatgctggaagggctggaagattgcccggaagatctctacctgatcgaaggggatccgcagtcgttcgatgacagcgtatttgccgtcgaagaacaggacaaagcggtggtggtgaagatcgccgatcgccagtggcgttattcccgctacccggaagtgccgctgttcggccgcgcggcgcgcgaaaaccgcctggaagtgctgcatgccgagcgtgaaacgctggcggagcgctatgccacgctgtcgttcgacgtgcagaaaacccagcgttcgcatcaggccttcagccgctttatcggcacccatctggcggtggcgttcgacgccgatccggaagcggagatccgcggcctgaacgcccgtcgcggcgagatcgagcgtgcgctgaacaatcacgaagcgcagaatcagcagcagcgccagcagtacgatcaggccaaagagggcatttccgcgctcaaccgcctgatgccgctggtgtcgttgctgaacgatgaaacgctgcaggatcgcgtcgacgagatccgcgaagagctggaagaagcacaggacgccgcgcgccacattcaacagcacggggtgtcgctgaccaaactggagccgctgctgtcggtgctgcagagcgatccgcagcagcatgaacagctgcagcaggactacgcgcaggcgcaaagcgtgcagcgtcaggccaaacagcaggcgttcgcgttgacagaagtggtgcagcgccgcgcgcacttcagctataccgactccgccggcatgcagaatgccaacaacgatctcaacgacaagctgcgccagcgtctggaacaggcggaagccgaacgcgcccgcgcccgtgagcagctgcgtcaatatcaaacccagttcacccaatacagccaggtgctggcctcgctgaaaagctcgtatgacgccaagcgcgacatgctgaaagagctgagccaggagctggtggatatcggcgtgcaggccgacgccaacgccgaagcgcgcgcgcgtcagcgccgcgacgagctgcatgcggcgctgagcaacaaccgcgctcgccgcaatcagctggagaaacagctgaccttctgcgaagccgaaatggatggcctgcagaagaaactgcgcaagctggaacgcgactaccatcagctgcgcgagcaggtggtgaccgccaaggcgggctggtgcgcggtgatgcgtctggtgaaagacaacggcgtggaacgccgtctgcatcgccgcgagctggcgtatatggatggcgacgagctgcgctcgatgtcggataaggcgctcggcgcgctgcgtctggcggtggcggacaacgaacacctgcgcgacgtgctgcgtctgtcggaagacccgaagcggccggagcgtaagattcagttctatatcgcggtgtaccaacacctgcgcgagcgtatccgccaggacatcatccgtaccgacgatccggtcgaggccatcgagcagatggagattgagctgggccgtctgaccgaagaactgaccgcgcgcgagcagaagctggcgatcagttcgaaaagcgtggccaacatcattcgcaaaaccattcagcgcgagcagaaccgcattcgcatgctgaaccaggggttgcaggccgttgctttcggccaggtgaagagcgtccgtctgaacgtcaatgtgcgcgaagcgcatgccactctgctggacgtgctctccgagcagcaggaacagcatcaggatctgttcaacagcaaccgcctgaccttctccgaagcgctggccaagctgtatcagcgcctgaatccgcagatcgacatggggcagcgtacgccacagaccattggcgaggagttgctggactaccgcaactacctggaaatggaagttgaggtgtaccgtggttccgacggctggctgcgtgcggaaagcggcgcgttgtctaccggtgaagccatcggtaccgggatgtcaatcctggtgatggtggtgcagagctgggaagaagagtcccgccgcctgcgcggtaaagatatctcgccgtgtcgcctgctgttcctcgatgaagcggcgcgtctggatgccaagtcgatcgccacgctgttcgaactgtgcgatcgtctggagatgcagctgatcatcgcggcgccggaaaacatcagtccggagaagggcaccacctataaactggtgcgtaaggtgttccagaaccacgagcatgtgcacgtggtggggctgcgcggtttcgccggcgagccgccggcgctgggcactgcgccggttgagacgccgtaacgcagaaaaacgccctaaaaatccgaaaatagccgccgcagggtggctatttttttgtgcgcgtggatgatagtcctgcttttttatccgttgaaaagcggttagtttaatcacataaacagttattcgacgcccgcagggcgaaacggcctttctgtttgtatactgaaactatatgcagtttttgacgtttttttttgtgagcatacagggggcaagggatgttgcttaaaaagggaaactctctacgacgtttggcgctgagtggcgctatcgcctgtagtcttgtgtcgtcgttttccgccttggccaccgtaacggcgttaccggtggcaacagcaggcatgtccgttgcgcagagtcgttctgaactgctggccgcgttgccgcgcggtatggatctgcactacctttccacgctggcgccgctgtatgcggcgaatcatatgcagccgatgtggcaggatcgcgaggccgttcagcaatttcaacagcagctggccgaactggcgatgtccggcgtacagccgcagttcacccagtgggtgaagatgttgaccgatccggcgctcagtgaagcgggccgcgatgcggtgttgtccgatgcgatgctgggctatttgcagtttgtatccgccatcggcgccaacggcaacaactggctgtacagcaatattccttacaagcttggtttgccgcccacggcggtgatcaatcaatggcagctggcggtgcgccaggcgcgaaccctgagctacgtgaattcgcttgcgccgcagcatccgcaatacgccaagatgcatcaggcgctgcgtgacatgctggcggacaaccgcccctggccgcaggtgggcaggggcccgagcttgcgcccaggccaaatgagcaacgatatcccggcgctgcgtgagatcctgacgcgcaccggcatgctggccgcctcggcgccggaagcggagccggaaccggcggtggtctcggcgaagagcaatgaacccgacgacggcgggctgacggtagacgaagagaaaagccgcgtgacggtcagcccatcggcggcgccggtgacggagttgaccgcggaacagacgccgccgcagatcggcagcgtggtgagcgacaacctctataccaacgagctggtggagggcgtcaagcgtttccagaaatggcaggggttgacggcggacggcgtgatcggcgtgcgcacccgcgagtggctcaacgtgtcaccgaaaacccgcgccgcgctgttggcgctgaatatccagcgcttgcgcatcttgccggggcatgtcggcaccggcattatggtgaacattcccaactactcgctgacctactatcagaacggcaacgaagtgttgtcctcccgcgttatcgtcgggcggccaagccgcaagacgccgttgatgagcagcgcattgaataacgtggtggtcaacccgccttggaacgtgccgaccacgctggtgcgtgaggatatcgtgccgaaggcgatgcgcgacggtaactatttccagaaacacggctataccgtgctgtcaggctggagcaacgatgcggaagtgatcaacccggcgatgatcgactggagcatggtttctgcgcgcaacttcccgtatcgcgtgcgccaggcgccgggcgccaccaactcgctggggcgtttcaagttcaatatgccgagctcggatgccatctacctgcacgataccccgaaccacagcctgttccagaaagacatccgcgcgctcagctccggctgcgtgcgggtgaacaaggcttccgatttggcgaatatgctgctgcaggatgccggctggaacaatagccgcgtttcctccacgctgaaagaaggcaataccacttatgtgaatattcgccagcgtattcccgtaaaactgtattatctgaccgcctgggtttcggatgatggccaaccgcaattccgtacagatatttacaattatgataatacggtgagatcgggcgcacaaattttggctcaggccaaaaaattaatgcagtaaatgcagtaattataaataaataacggtcagaatgtttggctataccgcaggccctcgtagccgggggcctgtaaacctaggcgtatcgcgggttgactcagcatacgcaggcggttatggttcggacagtgcgctgctttgtgcatttattttgacattcttgccgggtttaacagagtcatggacaaaattgatcatcatcgccgtaaatggctggcgctaggtggcgccgctatgggcatagcactgcttccagggcaggcatttgccagtctttccaccgctcgaccgcgtattttagtgctgaataacctgaataccggtgaatctattaaagccgagttctttgacggcaaaggctacaataaagaagagttggttcggctaaatcatctgttccgcgattatcgcgccaacaaggttaaatcgatcgatcccagcttgtttgatcacctctatcgcctgcaggggctgctgggtaccagcaagccggtgcagctgatctccggttatcgttccgtagataccaataacgaattgcgcgcgcacagccgcggtgtggccaagcacagctaccataccaagggccaggcgatggatttccatattgaaggtatccaattgagtaatatccgtaaagcggcgttaaaaatgcgcgccggtggtgtaggatattacccacgtagcaacttcgtgcacatcgataccggcccggttcggagctggtaatcgcggtgcctcagtgaataacgccgctccttgcggaggcggtgttattgtcgttggagccttatgaaataccatcttattcccgttaccgcctttagccagaattgcagcctgatctggtgtgaaaacacgcagcaggcggcgttggtcgatcccggcggcgaagcggaaaaaatcaaagcggaagtggcgaaacagggtgtgacaatcacgcagattttgctgacgcacggccatttggatcacgtcggcgcggcggcggagctggcggaacattatcaggtgccgatttacggcccggataaagaggacgctttttggctggatggtttgccggcgcagagccggatgttcgggctggaagagtgtgcgccgctgaccccgacccgctggctgtcggaaggcgatgagatgcaggtgggtgagatgacgctcaaggtgttgcattgccctgggcacacaccgggccacatcgtctttatcaatgagcaggcgcgtttggcgctggtgggtgacgtgctgtttaacggcggcgtggggcgcagcgacttcccgcgcggtgatcatcaggcgctgatcgcctctattcgcaccaagctgctgccattgggcgacgatatgcgctttattcccggccacggcccgatgtcgacctttggccacgagcgccagaccaatccgttcctgcgcgaagagccggcggtgtggtaacgattatttcccggccgaaataatcaagggcgcatagagcgccctttttttatgatttatgacctgcgtcgatgctttagagcacggcgacgatggcttcacacagcggtgccatgttgtccggcgtcatgccggccacgttcacccggcccgagtttacggcgtatacgccgaactcttcacgcagacgcagcacctgttctttggtcaggccgctgaatgagaacatgccgttctgctggatgataaagctgaagtcctgttgtgcgcctttctcctgcagggtgttcacgaacagctgacgcatgcggtgaatgcgctggcgcatgtcggtcagctcctgctcccacatcgcgcgcagcgcgtcattgcccagaatggtggcgacaacggccgcgccgtgtgacggcgggttggagtagttggcgcggatagccgctttcacctggctgaaggcgcgatcggcagtctcggcatcggcagctacaagggtgcaagcgccgacgcgctcattgtacaggccgaagtttttcgagtaggagctggcgacgatcagctcttgatgtttggcggcgaaaatacgcagaccctgcgcatcctcttccagaccgttggcgaagccctggtaggcgaagtcgaacagcggcagccagccattggcggcggaaagctcagccagctgcgcccactgttccgccgttggatcgataccggtcgggttatggcagcagccgtggaacagcacgacatcaccggcctgagcctgtttcaggctgttcagcaggccgtcaaaatccagcgcgtggttggctgcgtcgtagtaggcgtactccagcacttccaggccaacggcgctaaagacgttcttgtggttcggccagcttgggttgctgatccagatgcgcttggcgctggtctggttggcgataaagtctgccgccacgcgcaggccgccggtgccgcctggcgtctgtgcggtgcgtgcgcgacgatcggtgacgatcgggctctctttaccgaacagcagctcttgcgtgcagctggcaaacgccgggatgccttcaatgccgagatagtttttggtggtctcgttttccagcagatactgttcagctttttttacgctggtcagcaccggggttttgccggtttcatctttataaacgccaatgcctaaattgattttattcgggcgggcgtcggcgcggaaaatgtcggtcaggcccaggatcgggtcggcgggtgcggcggtgattttttcaaacatgtcaggtgcttccaaatctcggagttaagcagacagaagcatcagggtagcgccagttatcggctttgccaaccgtttgcgataaaaacaccgcgatcttgtgaacgggaaggattcgacagaaaaaatgagggataaggggaaatctgcaggataaaacgttaccggcagacacaaataaaaacagggccgaagccctgtttttttaacttagccgacggtgaaccgccgttaagcgagacaacttagaactggtataccagaccaacagctacgatatcgtcggtagcggtgccggttgctttggtgaactcgttgtcatccagcaggttgattttgtaatcaacgtaggtggacatgttcttgttgaagtaataggtggtaccaacagaaacatatttaaccagatcctggtcagaacccacgcctgggacgttcaggtttttacctttagattgcaggtaagacacttctggacgcagaccgaagtcgaactggtactgagcagtcacttcgaagttctgagttttgctcgcgaagccgccgcacttgtcatcggtagctgcacagcctgcaccgaagttaccgccgccgaacggagtcatgttacgggtttctgcgtacatcgccgccaggtaaacgttgttggcgtcgtatttcgcgcccacggtccatgcgtcagccttgtcgccacgctcgttggaacgcagtttttggtcgtcggtacggttagaagatgcgtatgcagcgccgaagcttacgccttcgccgatgtcataagtagaggagatgccccagccgtcgccgttttgtttcttgacgttacggccgtcgttctggtttttgccctggtactgaacggcgaagttcagaccgtcaaccagaccgaagaagttgttgttacgataggtcgcaacgccgttggtacggccggtcatgaagttgtcggtgtaggtgtaagtatcgccaccgaactctggcagcatatcggtccagccttccacgtcgtacagtacgccgtagttacggccgtagtcgaaggagccgtagtcagcgaatttcagacccgcgaagcccagacgggttttggtgccttcggtgccctgagattcggagtggttagcctggacgttgtattcccactggccgtaaccggtcagttggtcagtaatctgagtttcacctttgaagccgaaacgaacataggtctgatcgccgtcattacctttgtcgtcggagaagtagtgcagaccgtcaactttgccgtacagatccagcttgttgccgtctttgttgtagatttcagctgcgtttgctgcaccagcagccaacagagccgggataaccactgcaagaatgttgcgcttcatcattattaccctcattggtgttattcggacacctttgccactgccgccaataattccttgggaactattgttgatagattggtgtcgtcctgtgtctgaacgcagtgttccattcacaggcgggttaatctaggacgaaaatgataccaatgtcgcaatgaggttgcaaaaggaaagtatgtgtaaccaaatgtaatttttcgggaactttgtgacgtgcgtcaatattaaaaaatgcgaaaggccagcgaggctggcctttgttttgtaacgaaatcgtttaaaaaacgtgtgatcgtataaattagaagcttgcgttacgtggggtgcgtgggaacgggatcacatcgcgcacgttttgcacgccggtgacataggcgattaaacgttcaaagcccaggccgaaaccggaatgcggcacggtgccgtaacgacgcagatcgcgataccaccagtagtcttccttattcaggcccatctcttccagacgctgatcgagtacgtcgagacgttcttcacgctgagagcccccgatgatttcaccgatgcccggcgccagcacgtccatggccgcgacggttttgccgtcttcgttcatgcgcatatagaacgctttgatgtctttcgggtagtttttcaccactaccggcgcctggaagtgtttctccgccagataacgctcatgttcggaagagagatcgataccccaggagaccgggttttcgaaggtttggccagaggccagcaggatctcaatggcgtcggtgtagtctacctgggcgaaatcggaagagacgaagcgctccagacgcgcgatagcgtctttatccacgcgctcggcgaagaatttcagatcgtctgcacgctcatccagcaccgcctggaacacatacttcagcatgctttcggccaggccggcgacatcgtccagcgtcgcgaaggccacttccggctcgatcatccagaattcagccagatggcggctggtgttggagttttcagcgcggaaagttgggccgaaggtgtataccttggacagcgcacaggcgtaggtttcgccgttcagctggccggaaacggtgaggaaggcttccttaccgaagaagtcctggctgaaatcgacggcgcccttgtcggtgcgcggcaggttttccagatccagcgtggagacgcggaacatctcgccggcgccttcggtgtcggaggcggtgatcagcggggtagatacccagaaatagccattttcatggaagaagcggtggatcgcctgcgccagggtatgacgcacgcgcgccacggcgccgatcaggttggtgcgcgggcgcaggtgggccacttcgcgcaggtattcgatgctgtgacgtttggccgccatcgggtaagtatccggatcgtcgacccagccgaccactttgatcgcggtggcctgcagctcgaagctctggccttcgcccggtgaggcgacgaccttgccggtaacttcaaccgaacagccggtggtcaggtgcagcacttcatcttgataattcggcagagaattattaacgacggcctgtaacggatcaaagcaggaaccgtcatagacggccaggaaggagataccagcttttgaatctctccgggtacgtacccagccgcgtacggtgacttcactgtcaaccgcagcacgaccttgcagtacgtcgactacaggcactacgctcatagatttctctctttaataatttggtttagaaatagcttacaacccaagaatatgggggtaatggctatgttacttgccgcggtgcagagcacaagcagaaatcatcggattggcgcaacatttatcgcggctgactgaaaagagggcgttcgggataaaaacaaaaaagccggcgcgtgaaccgggccggctttctctctttatataaagaaggctcagctggctttcttcaccagcggcagatcgaaggccttgcgcagggccctgacgaacgcctggtcctggcagatggtcttgccggggctgtcggagagtttggccaccggcttgcctttgcactcgaccagcttgatcacgatatttaacggcttaacgccgggaatatcgcaggtcaggcgcgtgccgatgccgaagccgagattaatgcgctgatagaaatggcgatagagcgccagcgctttttccagatccagattgtccgagaacaccagcgttttgctcagtgggtcgatgcccagtttctgatagtgggcaatggccttttcaccccactcgacgggatcgcccgaatcgtggcgaagcccctgataacgctcggcgaactgcgggccgaagtcgcgcaggaaggcatccatggtgatgcagtcggtgagcgcgatgccaagctggtccggatattcatccagccaggcctgcaatgcggcgcgctggctgttggccagcaccgggcttatctgctgatgcgcctggaaccactcatgcgcctgcgtgccgaccggcgccagacccagctggtgcgccagatcgtaattgctggtgcccgacaggtacgggaattcggcctgcaaggtgctgacgatggcctgttgcacgccctgagagaaacggcggcgggtgccgaaatccatcaacttgaagcgcgaaagatccagatcgcccgccaacgtcttgaactgcgccagcttggtttgcagatgcgccaccgcctgttccggcgtcgccagcggcgagcgccggcggtgcaccacttcgctgatcactgccagcaatgggacttcccacatgatcacttcacgccaggggccggcgatgcggatttgcagcttgccgtcgcggttgtcgatggtgacctgctgcggatcgtagcggaacgttcgcagccagttcaggtaatcttgacggaagaagggcaggcccgaaagataagcgaattcggcgtcggttagcgccagccggctcatcagcgccacctgcgcgcggatctcgtcggcatattcgcccagcagttcgtcgccgcggcagcggaattccgccgccacgctgatcgcgggatagcgatggaacactgcttgctgcatatgaagcttataagcatcggtatcaagcagtgatgtcaaaatcggggaagcgtattgagtcatagcgcgttacagcatcctcgtcaggcgcgtgtccaaatccggataatcataaaagtgggggtggagtatacccggattatcctgttattgaagctgcatcacaccataaatcaccgaagcgggtcgaggattaaacgtgcctttatggcagccggatagcggcggagaggaaaaaaagccagatatgcctgtaaggtgaatgacttagcctaattagtcataaaaattataatgttaattattttaaacagcgaatcagataaagccggcctgggtatgcacgctgacccgatccttgccgttctttttgcaaaagtagagcgcttcgtccgcctgtttgatcgccgcctgcagcgcggtgaacgcgctgactggcgcaatgccgcagctggtggtgaaacgcacttgccgtccgtcggccagatttagcgtcaggcgatgagtacgggcgcgcaattgctccatgatgtcccgcgcgttgtccaacgaacagttgcccagcagcaccgcgaactcttcgccgccatagcggcagaagatgtcgctggcgcggaacgcgcgttgcagcaggtggccgaaggccaccagcgcccggtcacccacgtcgtggccgtagctgtcgttgagttgtttgaaattgtcgatgtcgatcaggcaaaaggcctgcgggtagctggcgttgcccagcagttgacattcaaggaagaatttacggcggttgtagatattggtgagcggatcgaggaaggaagaggcctcgagctctttaatcagcagttgtttctcgctctccagcgagaccttgtccagttggtattgcctgagctgctgaatggcgtcgctgatggcgatcaattcctggctgtagaaggcgtcgttgcgatcgatattcatctcaccgcgcgacagccgcacgatattgttgtgggtcttggtcagccagcggttgatgctggtgcagaacaccagcgccggcaaaatgaacagcaaaaccaccaggccggccagcgcgatcatgccgtaaatggtcgtctggctatcgtaaattttatgacgcgaagcgacggtttccagctcgaagctgcgttgatacagcgcctgcgaaagcccgctcagctcgtcgacatagcgcgaaataagcgctgcgggatagggtttttgggtattgatggcggtgtataacccatcggtgatctgcttgagacgttcggccgacactagggtgagcaactgattgacgagctcggtggtttgcacgtcgtcgtagttgatcttcatgaagatcaatcgggtgctcagcgcgttcagcacgccggttagctgaatggacttcagataggcgtctttgcgaacgagctggctgacgttgacgtcgataatctgatcgcttaattccgtcaatgacatatttagccggttattgaggcggatggcctcgagaaacataaaggagtcggtatccaccatccgggtatcgtaggtgtagcggtaataactcttgctggtttgcgagatgtaataggcgctgttgatgttgaacagattggcgttggtgttattgacctgcgaaagctgcaggttgtcattatccagcagctgttccatcaaagcgatcatcgacagcgcggcgattttttgctgaaccccaagctgtctggcgacctcatcgtccagatgttcgcggatccgggtgattctctcgcgcgctacccgatcggcggccaaacattgcgcacgggtgatttgcggatcgatcaggctcaatcgtttgaggcgatgagccagcaacgcagcctgaaaagcttcggaaatttctttggcgcgatcaattttgtacaggtttagctggttgtcgcggtagtcggtatgggcttcgagcagctcatcgacgatgaacagagagaaagaagtcatcaggcacagggtgaaaaaatagattgcgtatttaatcttcataatgcgagccatccctgaacctgatgccgcaattataccaccatgccgccggtgtcgcctcaactatgccggcgcgccgcgatggcggttttttagcagtaaatgctgatttttatttggccattggtcacccgcactgccgcctgccgggcgatttatgatttgcctctgatttctctctcctggtcgccctgcggctctgggcttttcggccagctgtgatacagtttattcacaattcaggctcaccgcgcgccgcaggggaacataccggctgcggtacgaaggagaagagcagcctggcacctataactcactgagacgtttaagggtttttatgacacaacagccacaggcaaaataccgccacgattatcgcgcgcccgattacaccacgaccgatatcgatttggacttcagtctggacgcggaaaccacgcgcgtgaccgccgtcagtaaaatcaaacgtcagggggcggccggtgcaccgctggtgctggatggcgaagatttgacgctggtgagcattcaggtggacggccaaccgtggagcgcctaccgtcagcaggataaccagctgatcatcgaagagttgccggcacaattcactcttaccattgtcaacgatattcacccggcgaagaacaccgcgctggaagggctgtacctgtccggcgatgcgctgtgcacgcaatgcgaagccgaaggcttccaccacattacttattaccaggatcgcccggacgtgctggcgcgctttaccacccgcatcgtggccgacaagacgcgctatccgttcctgctgtcgaacggcaaccgcatcggccagggcgaattggccgatggccgccactgggtgcaatggcaggatccgttcccgaaaccttgctacctgttcgcgctggtggcgggggatttcgacgtgctgcgcgacagcttcaccacccgttccggccgtaaggtcgcactggagctgttcgtcgatcgcggcaacctggatcgcgccgactgggcaatgacttcgttgaagaactcgatgaagtgggacgagacccgcttcggcctggaatatgatctcgacatttatatgattgtggcggtcgatttcttcaatatgggcgcgatggagaacaaagggttaaatatctttaactccaaatatgtgctagcgaaggcggaaaccgcgaccgacaaggattacctgaacatcgaagcggtgatcggccacgaatacttccacaactggaccggtaaccgcgtgacctgccgcgactggttccagctcagtctgaaagaggggctgacggtgttccgcgatcaggaattcagttccgatctgggatcgcgttcggtcaaccgcatcgacaatgtgcgcgtgatgcgcggcgcgcagtttgccgaagacgccagcccgatggcgcacgccatccgcccggacaaagtcatcgagatgaacaacttctacaccctcacggtgtatgaaaagggttccgaggtgatccgtatgatgcataccctgttgggggaggagaacttccagaaagggatgcagctctatttcgaacgccacgacggcagcgccgctacctgcgacgatttcgtgcaggcgatggaggatgcgtctaacgtcgatctgtcgcgcttccgccgttggtatagccagtccggcacgccgctgttgacggtgcgcgacgagtacgatgcggaaactcagcaatatcgcctgcatgtcagccagaaaactgcgccgaccgccgatcagccggagaagttgccgctgcatattccgctggatatcgaactgtacgacagcgaaggcaatgtcattccattgcaaaaaggcggcctgccggtcaacaacgtgctgaacgtcaccgaagcggagcagaccttcgtgttcgacggcgtggcgcacaagccggtaccgtcgctgctgcgcgaattctccgcgccggtgaaactggactatccgtacagcgatcagcaactgaccttcctgatgcagcacgcacgcaatgaatttgcacgttgggatgcggcacagagcctgctggcgacctatatcaagctgaacgtggcgcggcaccagcagaagcagccgttgtcgctgccgctgcatgtggccgacgcgttccgcgcggtgctgctggacgaaaaactggatccggcgctggcggcgcagatcctgacgctgccgtcggagaacgaaatcgccgagctgttcaccactatcgatccggaagcgatcgccgcggtgcacgaagcgatcgtacgctgcctggcgcgggagttggccgatgaatggctggcggtgtatcacgccaacaagaccgacggctaccgcgtggagcatgccgagatcgccaagcgcgccttgcgcaatgtgtgcctgggctatctggcgttcggcgaagatgtggcgctggcggaccagctggtgaacgaacagtatcgccaggcggacaacatgaccgactcgctggcggcgctgtctgctgcggtcgcggcccagctgccgtgccgcgatgcgctgctggcggcgttcgacgagcgctggcatcaggatggcctggtgatggacaaatggttcgtgctgcagggcagcagcccggcggcagacgtgttgagcaaggtgcgcgcgctgttgcaacaccgctcgttcagcctgagcaacccgaaccgcacccgttcgctgatcggcggcttcgcttccggcaacccggcggcgttccatgccgcggacggcagcggctatcagttcctggtggagatcctcagcgatctcaaccagcgcaacccgcagatcgccgcgcgcctgatcgaaccgctgattcgcctgaagcgttacgatgccggccgccaggcgctgatgcgtaaggcgctggaacagctgaaagggttggaaaacctgtccggcgatctgtacgagaagatcagcaaggcgctcgacgcctgattttttcgcgctagagacatcaagggacggcctgggccgtccctttttcattcaattcgccgcccggcgcgcggcgtccgtcgcggcaggcggcgataacacccgttccagcacttcggcctccagttccgccagcctggccgagcctttgcggcgcggccgcggcagatcgatgctcagatccagcccgatatgcccctcttcaatcaggatcacccgatccgccagcgcgatggcttcgctgacgtcatgtgtgaccagcagtacggtaaaaccgtgttgtagccacagcgtttctatcagcccttgcatctcgatgcgcgtcagggcatccagcgccccgagcggttcatccagcagcagcaggcgggggcggtggatcagcgcgcgcgccagggcgacccgctgcttttgtccgccggacagcgccgccggccaatcgcgggcgcgatccgccaaaccgaccgcttccagggcttgcaacgccgcgtcgcgccactggccgcgcagccccagacccacgttatcgatcaccgttttccatggcagcaggcgcgcatcctgaaacatcaaccgggtatcctctttagcggcggcgagcggcgcgttgccgctgagcaaagcgccgctgctggcctgttccaggccggccaacaggcgcagcagggtgctcttgccgcagccgctgcggccaaccaccgccacgaactgcccggcggaaatgcgcagctgaatattgtccagcaccgtgcggttgccgtaacgtttgccgatagactccagcgtcaccggcgtgccttgcgcaaggcgagcgggaagggtcatagcgcttctccctgtttcagttgataggccggatgccagcgcaaccagacgcgctccagcagctgcgcgcccacgtccgccagcttgccgagcagggcgtacagcacgatcgccaccaccaccacgtcggtttgcagaaattcacgcgcgttcatcgccaggtagccgatgcccgaattggccgagatggtttcggcgacgatcagcgtcagccacatgaagccgagagcgaaacgcacgccgaccataatcgacggcagcgcgcccggcagcaccacctgtgtaaacaggcgaaaaccgctcaggccgtagctgcgggccatctccaacaggccgcgatcgatgtttttgatgccgtgataggtattgagataaatcgggaacagcgtaccgagcgccaccagaaagatcttggcggattcatcgatgccgaaccacaggatcaccaacgggatcagcgccagatgcggcacgttgcggatcatttgcaccgagctgtccagcaggcgttcgccccagcgcgacagcccggtaataaagccgagtatcagtccgatgctgccgccgatggcgaagcctaacaacgcgcgctggctgctgatgctcaggtgctgccacagttcgccgctttggctcaggcgccagaaggcggccagcaccgcactcggcgccggcaaaatgcggttggagagccagccggtttcgacggcgatttgccagatgatcaccagcgccagcggcagcgtccagggggccagccgatacaggatgcgttgtacgttatttgccatcggggcgctcctcagctctgcgatactttttgcggaacatagatgttggccaccacttcgccctgcggacgcaccggctgaaggcgagcgggcgtttcctcctgcgctagatcgaggtgcgggaacagcagttcgccgacgcggtaggcctcttccagatgcggatagccggagagaataaaggtgtcgatgcccagatcggcatattcctgcatgcgcgccgcgaccgtcgggccatcgcccaccagcgcggtgccggcgccgccgcgcaccaggccgatgccggcccacaggttcgggctgatctccaggttatcctttttgccgccgtgcagcgccgccatgcgccgttggccgacggagtcgaagcgcgcaaaggcctgctgcgcgttggcgatggtttcctcatcgaggtgggcgatcagccggtcagcggcgcgccaggcttcttcggtggtttcccgcacgatgacgtgcagccggatgccgaaacgcacctggcggcctttcgccgccgctttggcgcgcacctcttcgatcttcgccttaacctgcgccggcggctctccccaggtgagatacatttctacctgctcggcggccagatcctgtgcggcggcggaggatccgccgaaatagagcggcgggcgcggctgttgcaccggcgggaacagcagtttggcgcctttcacctgaatatgcttgccgtggaaatcgacggtttccccttccagcacccggcgccagatgtgggtgaactcggttgaggcttcgtagcgttcttcatggctaaggtgcagcccctcggccgccagctcttccggatcgccgccggtgaccagattgaacagcgcgcgcccgttggacaggcgatccagcgtcgccgcctggcgcgccgccagcgtaggggagatgatgcccggccgcagcgcgaccaaaaatttcagccgctgggtgaccgggatcagcgaggcggccaccagccaggagtcttcgcaggagcggccggtggggatcagcacgccgccgaatcccagccgatccgccgcctgggcgatctgctgcaagtaaccgtgatcgacgctgcgagcaccctgtgcgctgccaagatagtggccgtcgccgtgggtgggtaaaaaccagaaaacgttcaggctcatcgtcaatgctctcccgtatttattgcgcgcttgggcgccagatgcgttgcgagatgtcgaccttcaccggcaccagccggttggcgtaaaacaggtcggcggtttgctgctgcgcggcgatggtatgcgcatcgagcggtgtgatggcggtcggggggcggtgatccagatagctggcgatcaccggttccggcagccccatggcgttggccagcaaggtcacgctttgcgcccggtcgctgcgggtgagcgcatcggcctgggtcagcaccgtcaggacctggctgataaaggcgccgttggcttcgacataagggcgtgccgccagatagaaggagccggtctggttcagatcggtgccgtcgccgagcacccgaacgccgccctgcagcagcgcggcggaataataaggatcccagatcgcccaggcatcgacgttgccctgttggaatgcggcgcgcgcatcggcgggcgtcagataggcgggctggatatccgtaaatttcagtccggctttttgcagcgatcgcagcagcaggttatgtgagctggatcctttctggaacgcgaccttatggcctttcagatcggcgacggttttgatcgggctgttttccggcaccaggatcacttccgccttcggtttgggcggctcaacgccgacatacagcagatcggccccggcggcctgcgcgaagatcggaggaatatcgccggtgctgcccagatcgatgctgccgacgttcagggcctccagcatttgcgggccggcgggaaactcgatccaactgatgcgggtggcggggaaacgttcctccagcagccggtggctcttcgccagcaccagactgaccgatcctttttggtagccgatgcggaattgcgccggatcctgagcgacggcggcgttggcccaaaccagcgacagcaggccggtgaaggcggcggcgctcagccaacgccgcaaagcaatgcgttgtttcattcaggctctccttttccaggcgtttcaggcggtttgacgcgccgccagtggcgaggcgacgcgcagcgccggcggtttgcggcggccaagtgccagatagaaactggccagtgcctcttccagccgggcggccacggcgtcggtgagcgtggcgccttcgtcggtcagctggatctggctgtcgtcggcgaacacgccgtgcagcacctcttgcgctttcagcgccgccagtaccggtttcaacgcatagtccaccgccagcatgtggccgatcgaaccaccggtcgccagcggcaacaccaccttatgatccagagcgcgttccggcagcagatccagcagggttttcagcgcgccggagaacgacgctttataaaccggcgtggaaatcagcaggccgtcggcctgcgccagctgctcggcaaacgccttgatcgccggactgttgaagttggcgtacagcagatcttcggcgtcaaagtcgtgcagggtataggccgtcacttccaccccttgctgccgcagccagttctgactcagcgagagcagcgcggcggaacgtgatgggatgcgtgggctaccggccagtgatataacgcgcattgccactccttataactaaaagttaggtttaattagaaaatcaatgggaagtgttttaaacctaccagcaaccgggcgcgttttttaaatctcattttttgatttggatatgcgcaaaagcggattagcgccgatttggcggtgaagagggaaaacgattgcgtaaaaacggctttttttgcctttaatcaattccaattaggcgggggataccggataatacgcccccggtttgcaaccgggaaatcaggagagtccatgtactaccccctcatcaggaaagcgttgttccagctcgatccggagcgcgcgcacgaagtgacctttcgtcagctcagccgtattaccggcaccccattagcgtttcttgtccgtcagtccgtgccgaccaaaccggtcaactgcatggggctgtcgtttaaaaacccgctgggattggctgccggtctggataaaaacggcgaatgcatcgatgcgttcggcgcgatgggcttcggccatgtggaagtcggcaccgtgacgccgcgtccgcaaccgggcaacgacaagccgcgcttgttccgcgtggttgaggcggaaggcctgattaaccgcatggggttcaataaccatggtgtggacaatctggttgaaaacgttaagaaatcccatttcggcggcattcttgggatcaatatcggcaagaataaagacacgccggtcgagcagggcaaagacgattatttgatctgcatggataaagtttatccgtatgccggatatatcgcgattaacatctcttcaccgaatacgccggggttacgatccttacagtatggcgaagcgctggacgatcttttggctgcgattaaaaataagcagcaggaattacatgcgcgtcatcacaaatatgtgccggtggcggtaaagatcgcgccggatctttcagaagaagaattgatccaaattgccgatagcctggtgcggcataatatcgatggcgtgatcgccaccaataccacgttggatcgaaaattgatccaggggttgaattactgcgaacaagcgggcgggttaagcgggcgtccgttgcaatcacgcagcaccgaagttatccgtcgtctctccaccgaactgcaggggcgcctgccgattattggcgtaggcggcatcgattcgctgacggcggcgcgcgaaaaaatggaggccggcgcgagcctgctgcaaatttattccggatttatctatcacggcccgcgtttgattaaagatatcgttacccatatctaatatttttcctctcattttattccgggggtttatttctgcccccggctcgtctatattttgttcgttagcttaaatatcgttcgcggaattatccgatgtttaagcgatttcatcggtgataaaatcgccttttagggtgagtgcggcgttggcataggcagcgagaaggatacgaaatgaagataaaacctgacgataattggcgttggtattttgatgccgaacacgatcggctaatgctggatttagctaatggtatgatctttcgttcacgtttcccggccaaaatgttaacgccggacgcctttgatgaatgtgctttttgcgtggatgacgccgccctttatttcacctatgaagaacagtgcaagcaggtcaagcttagccatgaacagcgcgccgagctggtgctgaatgcgctggtcgcctatcgcttcctgaaaccgctgatgccaaagagctggcatttctcgcagcagcattacccgctgcagccgaaaaacggcgagctggcggcggtgaaagtgatggagagcggcgcggaagcgcgcttgctggtggtggaggccggggataacgccagcctgtgcctgctggcgcaaaatcagctgacggtcgccggccgtaccatggtcttgggcgacgccatcaaggtgatgcacgatcggctgaagccctgcgcacaggatgaaagcgccgccccggcttacgacagggcggtataaggcggtttacgccagggtcaaatcacttttcgggatgcagctgcagcacaggatggtgccgttgtcgcccagcgcgcttttcttcaggggcgcgacctcaccgctcagcaacgtaatgcggcaactgccgcaaatcccggcgcggcaggagtaaggtacgcggatgccttgctgttccaactgttcgagcaagatctgctggttgttgccggtaaacacctttccttcatattcgatcgtgacgctgtgcgcgctgtcttgcggcgcctgcacgctctccaccactttgcctgcgccataagggcgcggcggcttggtcgacagcacttccaccgtatcgcccacgcggatgatgccgctgttgcgggcgatcatattctggccgaaatcgatatcgccgttgtcggcggagcggaatttttgcagcgtgctgagcggttcgccgctcgggtgcttgcggccgcgctcggtgctgacggtggtgagcacgcagcggctgcagggtttcaccagatcgaacatcacgtcgccgacgcggatcacctgccagccgtcctcggcccaggcggtggcgccactcaccaccagattggggcggaactgctccagcttgatgctgccagggcaacgctgctgcagatcgttaaacgaagcctggttaatcagcagataaggatagccgtcggcaaacgtcagtgggatttcggggtgcttcttcacccggcgggtcagctccggccccagccagcgcagctgtacgtcgcgctggaaatagccgctcagccagcggttgatctcatccggcgcggttagcgcggtgaaatggttgccccacacctcggtcggctgcggcgcggcggcgaagtcgctgaagcgaatggcggcgctttcgccgtccggcgcggtcaggaatagcccgtccggcaacagcgccggtgtgaacagcaccatctgcgggtattggcgcgcggtaataaaggtgccgtccggctcggtgatcataaagttgcggtcgaaggccagaccgctgctgccgacctgggcgtaggaaagctgcaggccgcgcagtgatttaaccggatggacgtagagtctggaaagcgtgatcacccttatctccgtgcgatgattaaatagaagggagcaactttatgacaagcggtgcggattagctataatgcgcaacaattttctttttggtgataagtacgatatgaactctctgtttgccagcacggcgcgtggattggaagaactgttaaaaagcgagctggaagcgcttggcgctcacgactgcaaagtggtgcagggcggggtacattttcagggtgacgatcgtcttctgtaccaaagcctgctgtggagccgcctggcttcgcgcattctgttgccgctgaacgaattccgcgtgcacagcgatctggatctgtacctcggggtgcaggcgatcgactggccgagcatttttggcgtggataaaacctttgccgtgcatttcagcggcgtgaacgaagagatccgcaacagccagtatggcgcgctgaaggtgaaagacgccatcgtcgacagctttacccgtaaactcgaccaacgcccgacggtcgccaagcagcagccggacattcgcgttaacgtcttcctgcaacgtgatatggctagcgtggcgctcgatctgagcggcgaaggcctgcaccagcgcggctaccgcgatctcaccggccaggcaccgctgaaggaaaacctggcggccgccatcgtgttgcgttccggctggcagccgggcacgccgatgctcgatccgatgtgcggctccggcacgctgttgatcgaagcggcgatgatcgccgccgatcgcgcgccgggtctgcaccgtcaacactggggcttcagcgcctggaatggccacaacgccgaactgtggcgtgaagtcaccaccgaagcgcaggtccgcgcgcgtcgcggcctgcaggaaaccgcctctcgcttcttcggctccgatatcgatcgccgggtgattgagatggcgcgcggcaacgcccgccgcgccggcgtcgccgagctgatcaccttcaacgtcggcgacgtcgcgcgcttgaccaacccgctgccggaaggcccgcacggcacggtgatcagcaacccgccttacggcgagcgtctggaaagcgaaccggcgctgatcgcgctgcacaacatgctggggcgcgtgatgaaaaacgccttcggcggctggcagctttcgctgttcagtgcctcgccggagctgttgagctgcctgcagctgcgcgccgagcgacagttcaaggcgaagaacggcccgctggagtgcgtgcagaaaaactatcagctggcggcaagcccggccggtagcgccaccggcggcgtgcaggtggcggaagatttcgccaaccgtctgcgcaagaatttgaagaagctcgacaagtgggcgaagcaacaaggcattgaatgctaccgcctgtacgacgccgatctgccagaatacaacgtcgcggtggaccgttacggcagcaaggtggtggtgcaggagtatgcgccgccgaaaaccgtcgatgcgcagaaggcgcgtcagcgcctgttcgatgtgatcaacgcgacgctggcggtgctggaattgccgtcgaatcagctgatcctgaaaacccgcgagcgccagaagggcaaaaatcagtacgagaaactggcgcagaagggcgagttcctgctggtggaagagtataacgccaagctgtgggtcaacctgaccgactatctcgataccggcctgttcctcgatcaccgcatcgcgcgccgtatgctgggcgagatgagcaatggcaaggacttcctcaacctgttcgcctataccggcaccgccagcgtgcacgccgggctgggcggcgcgcgcagcaccaccacggtggacatgtcgcgcacctacctggaatgggcggagaagaacctgcgcgccaacggcctgaccggccgtcagcatcggctgatccaggccgattgcctgtcttggctgagcaacgccaatgaacagttcgacgtgatcttcatcgatccgccgacgttctccaactccaagcggatggagaacacctttgacgtgcagcgcgatcatctggcgctgatgaaagatttgaaacggttgctgcgccgcaacgggaccatcatgttctcgaacaacaagcgcggtttccaaatggatatggcagggctgagcgcgttgggtctggaggcgaaagagatcaccgccaagacgctgtcgcaggattttgcccgtaaccgtcagatccacaactgctggctggtgactcacgccggcgaaggaaaataattactatgtcgttaatcagcatgtccggcgcctggctctctttcagcgatgcgccactgttagacaacaccgaaattcatattgaagacaacgagcgcgtgtgtctggtcgggcgcaacggcgccggcaaatccacgctgctgaagatcctcggcaaagagatcccgctggacgacggccgggtgatctacgaacaggatctgatcgtggcgcgtctgcaacaggatccgccgcgcaatatcggcggcagcgtgttcgacttcgtggcggaaggcgttgcggagcaggcggaacacctgaaggcctatcacgcgatctcccacctggtggaaagcgatccgagcgagaaaaacctggcgcgcatggcgcaaatcatggagatcctcgatcaccaggggctgtggcagctcgacagccgcatcagcgaagtgctgctgcagctggggctgaacggcgacgccgagctttcctcactgtccggcggctggctgcgtaaagcggcgctgggccgcgcgctggtgagctcgccgcgcgtgttgttgctcgacgaaccgaccaaccacctggatatcgaaaccatcgactggctggaaggtttcctgaaagagttcgacggcagcatcgtcttcatctcgcacgaccgttcgtttatccgcaacatggcgacgcgcatcgtcgatctggatcgcggcaagctggtttcctggccgggcaactacgatctctatctgcagagcaaagaagaagcgctgcgggtggaagagctgcaaaacgccgagttcgaccgcaagctggcgcaggaagaggtctggatccgtcagggcatcaaggcgcgccgcacccgcaatgaaggccgcgtgcgcgcgctgaaggcgctgcgcgtcgagcgctcgcagcgccgcgaagtgatgggcaccgccaaaatgcaggtggaagaggcgacccgctctggcaaaatcgtgttcgagctggaagacgtcaattatcaggttggcgaaaaggtgctggtgcgcggtttctccgcccaggtgcagcgcggcgacaagattgcgctggtggggccgaacggctgcggcaaaaccacgctgctgaaactgatgctcggtcagctgaaagccgacagcggccgcgtgcactgcggcaccaagctggaagtggcctatttcgaccagcaccgcgccgatctcgatcctgagcgcacggtgatggacaacctggcggaaggcaagcaggaagtgatggtcaacggccgtcctcgccacgtattgggctatctgcaggacttcctgttccaccctaaacgcgcgatgacgccggtgaaggcgctgtcgggcggtgagcgtaaccgcctgctgttggctaagctgtttctgaaaccgagcaatctgttgatcctcgatgaaccaaccaacgatctcgacgtcgaaacgctggagctgctggaagagctgatcgacggctatcagggcaccgtgctgctggtcagccacgatcgtcagttcgttgacaactcggtgaccgagtgctggatcttcgaaggcaacggcgtgatcaatgccttcgtcggcggttactacgatgcgcatcatcagcgcgcgacggcgaaaccgattcgtcaggcggcgccgagcgcgagcaaaccggcggcggagaaaaaggccgaacagccgaagaaaacggcggccaagctgagttacaacctgctgcgtgagctggaacagttgccgcagcggctcgaacagctggaagcggaaatcgaagcgctgcaggcgcagatgagcgacgccgactttttcacgcggccgcatagcgaaacgcaagaagtgctgacggcgctggctgatgccgagcaagcgctggaacaggctttcgcccgttgggaagagctggaagcgatgaaaaacggctgaccgttgcgatgccgcccgcgcgctgctgcgggcggcatcgacgtgccggtgagcgacgttatttaggaggaatatggtgtgttcccacaacaatcatcagcagcatagtcattccgcaccctcggcggcgcagcaggataacctgatgctgtgtccgcagtgcgacatgctggtggcgctgccgccgctggcctatggcagcaaagcggtatgcccgcgctgcaaaaccacgctcagcgcccgctgggacgagccgcgcaagcggccgatcggttacgcgctcagcgccttgttcatgctggtgctggccaacattttcccgtttatcaacatgcgcgtcgccggcctcggcaacgaaatccggctgatccaaatcccggaagtgatggtggcggaagactacgccagcatggccaccttgtttatggtgttcgtgcagctgatcccggcgttttgcatggtggcgattatcctgctgtgcgccagagtgcgcttgccgctggggctcaaagagtggatggctcgggtgctgttccagttcaagacctggtgcatggtggaaattttccttgccggggtgctggtcagcttcgtcaagctgatggcctacggcgatatcggcatcggcagtagcttcgtgccttactgcctgttctgcctgctgcaggtgcgcgccttccagtgcgtggatcggcgctggctgtggcaggatatcgaaccggcgccgcgactgcatcgcccgctgacggtggggcgcaccggcatgcgccagggcgtgcgctcctgcgcgtgctgcacggcgatcctgccggccgatcaggtgcgctgtccgcgctgtcacaccaagggctacgtgcggcgtcgtcacagcctgcagtggacgctggcgctgctggtgacctctgtcatgctgtatattccggccaacctgatgccgatcatggtgaccgaggcgctgggcaacaagatgaactccaccatcatggcgggggtgatcctgctgtggggggacggctcttatccggtggcgatggtgattttcatcgccagtatcatggtgccgtcgctgaaaatgttggcgatcggctggctgtgctgggatgcgaacggcaggaagaaaccgcgcgccgacagcgagcgtatgcatctgatttatgaagtggtcgaattcgttggccgttggtcaatgatcgacgtgtttgtgatcgccgtgttgtcggcgttggtgcgaatggggcagttgatgagcatttatcccgcgacgggcgccgtgctgttcgcgctggtggtgatcctcaccatgttcgccgccatgacatttgatccccggctgacctgggatcgcgcaagtgaaacaatcaacaaggagccgcaaggtgacggaaaataatcatagcgtcgcagacgttgagaagatcaaacgctggtcgccggtgtggatcattcccatcgtgaccgcgctgatcggcgcctggatcctgttttaccacttcagccatcaggggccggtggtgacgctggtgaccacgacggcggaagggctggaagcgggtaaaaccaaaatcaaaagccgcagcgttgacgtcggggtggtggaaaccgtcacgttgagcgatgacctgagcaaggtgatggtgcaggctcgcctcaattccggcatggaaaaattgctgcgccaggattccgccttctgggtggtgaagccgcagatcggccgtgaaggcgtctccgggctgggcacgctgctctccggcgcctatatcgaactgcagccgggcaacaaaggcaaagacggcaaagacaactatcagctgctcgatgcgccgccgctggcttccccggatgccaaagggttgcgcatcgtgctggacagcgagaaatcaggccagctcaacgccggcgatccggtgctgttccgcggttatcgcgtcgggtcggtggaaaccagctacttcgatcctaaagaacgcgccatgcgctatcagctgttcatcaccgcgccttacgatcagttggtcaccaccaacgtgcgcttctggaaagacagcggcgtggcgttcgatatgtcggcacagggcatgcgggtggagatgggctcgttgaccacgctgttcagcggcggggtcagttttgacgtgccggacggttgggatcgcggcgaacaggcgaaagaaaaggcggaatatcagctgttcgacaaccagcgcagcacgcaggattcactgtataccgtgcataaggattacctgctgttcttctccgactcggtacgcggcctgcagccgggcgcgccggtcgagttccgcggcatccgtctgggtacggtggcgcaggtgccgttctataaagacggcatggcgcagcgtctggataacgattaccgcattccggtgctgatccgcatcgagccggatcgcttccagaaacagctgggcggcaacttcgatattgaagggcacctgaaagatgcggaatctcgcggcatgcgcgcctcgatgaagtccgccaacctactgaccggttcgctgtacatcgatctcgacttctatccgcaggaaaaaccgtggaaagggccgcgcgagctgttcggttatccgctgatgccgaccaccagcggcggtctggcgcagatccagcagaaactgatgcagacgctggataagatcaactcaatgccgatcaatccgatgatcaacgaagcgaccaagacgctggcggagagtcagaaaaccatgaagtcgacgcagcagaccatgaagtcgctgaacgacatcatcgccagcaaagagatgcaggcgctgccgcaggacatgcagaaaacgctgttggaactgaaccgcagcatgaaagggttccagcctggttcaccggcttacaacaagatggtgggcgatatgcagcgcctcgaccaggtgttgcgtgagctgcaaccggtgctgcgcaccctgaatgagaagagcaacgcgctggtgtttgaagccgccggcagcaatgaccctcagccgaagaaggccacgaaatgatgaaatggatcccggtagccctggcgctgttgctcagcgcctgcagcagttcaccacaaaagacttactatcagttgccggcgctgggtgcgcctgctgcggccagcagcagcggcgcttccacgcgccagctgtggctggaacacgtgagcgtggcggattatctggcgcagagcggcgtggtgtatcagaccaacgacgtacagtatgtgatagcccagaacaacctgtgggccagcccgctcgaccagcagttgcagcaaacgctggtcaccaaccttagcagcgcgctgccggggtgggtggtctcttcgcagccgatgagcagcgatcaggatgtgctgaacgtgaccatcagcggctttcacggtcgctttgacgggaaagcgatcattcgcggcgagtgggtgctgaaccgccaggggcgtttgatcaaaaggcctttcaacctggagctgaaacagggtgaagacggctatgatgccctggtgcgcactctggcgcaggggtggcagcaggaagcccaggctatcgcagcacagatgggcggcatttagtcataatttggtctaaaatcgtctaatccctgtcggcgtgaaaatccgttttttctcgctggcagggatttctatttcatttcaaacagttaacccctttcccagcagatcagccacttagcactttcctcgggcgtagctcacaaatatgacattggcgtgaattttgcgcattgatcttctcttcttttagcgctattgattactcgtggctgcgcaaaaagcagccattgttttctttccaccagaccaaaatgagggaaacgaggcatgaagagacagaaacgcgatcgtctggaaagggcgcattcgagagggtatcaggcaggtattttagggcgttccagggaacattgtccctaccaatcatcggtggacgcccggtctcaatggctgggaggttggcgagaagccatggaagacagggctgtgaccgcttaagcggctccctgtcaaataaaaggaataacctccgcccttggcggaggtttttgtttgtgccgtttactcgtcctgccagcgtttcagtagaatactcgcattcacgccgccaaagccgaagccgttcgataaggcgtaggttatgttcatcgattcagcccgtttcgcgaccaggtgtaaacctgccgccgccggatcgggattgtccagattcagcgtcgcgggggcgatctgatcgcgcagcgccaaggcggtaaagatggtttccagccccccggcggcgccgagcaggtgcccggtggcggattttgtcgaggttaccgcgatgcttcctgtcgtgccaaacaggtgtttgatggcgttgatttcgcccagatcccctacgggtgtcgacgtcgcgtgtgcgtttaaatgctgaacctcttctggggcgatgttcgcctgcctcaacgcgattttcatcgcccgataagcaccgttgccgtcttcggcaccggaggtcatgtggtaggcgtcggcgctggtgccataaccgacgatttccgcgagcggtgtggcgccgcgcgccagcgcgtgttccagcgtttcaatcaccagcatgccggcaccttcccccatgacaaatccgtcccgggcactgtcgaaaggccgggaagcctgccttgccaactcggtcggagcggtggacatggcgcgcgcggcggcgaacccgcccaggctgacggtatctatagcggcttcggtgccgccgcacagggcgatatcggcttcatcattgcggatcatacgcactgcgtcgccaatggcttgcacgccggcggcacaggcggtgaccggcgcgccaatcggtcccttgaagtggtgtttgattgaaacgtggccggccgccagattgaccaggaatgaggggatggtgaacggcgacagccgcttggcgccgcggctgtcggtggtgcgcaccgcctgggcaatcgccgggaagccgccaatgcccgaggcgatgacggtggcggtgcgctcttgtttttcgtccgtatcggctatccagccggcctgacgaacggcttcatccgccgccgccatggcaaacaggataaagcgatccattttcttttggtccttgggggcgacggcagcgtcggggttgaagcccgcttcagcatcctgcgccagcgccggaacctgacctccgaccttgaccggtaaatctgcaacgatctcgtcaggcaacgctcgaatgccggactctccttttaacaaacgttgccagatggcttcaacaccgcaccctagcggtgaaacggcgcccatgccggtaatgacgatacgacgattgctcatgatggctccttggtaaattcgggtaaatcggcgaggcgccgttgccgcatcagtgcggcgcgttgatgtatgccttcatttgccgcaggccctggtgccaacgtaataaactgcggcggcacctgctgttgggtatcgacattgaccaattggacctggatcggccgatcggtgcggccgtcgactaacaaggcgctgatgtcaccattgatcaaatggcgattgccccattctgaaagagctgccagcacggggagaaaatcgttgccgcgttcggtgagcagatactgatagcgaaccggccgcgtttgataacgttgcttatgcagaatgccgtgggctaccaaatccttcagtcgccgggccaggagagtcggtgacatccccagactttgttggaattcgtcgaatttggataacccctgaaaggcatcacgcaggatcagaatgctccaccattctccgacacgatctaatgaacgtgcgacggggcaaggtgcatcgctaaagcgggttttttgcatatcggcccttagttggtacatttattgtagttacatgggtggctatactaggtgattttaaggggcaagaaaataaccggatgcaaaaaacgctatcgtgtcgatagctggctgtgggaggggggcgctcaaactggcctgtggctttgaccgtttcgggcaggaaaagggtagagacaggagggataagtcggttcggtaacgggcgattaaaggaggtaggcagtctttaaacggtaagagaaagaaatgccatcacgctgggcgtgatggcatgcgaagagcattagcaaagaagacgatggccgccctctcgtctgcgtgattagaacgctgtggtatccttgaacagacccactttcagatcggtggcggtatagatcacttcgccgtcaaccagcacttcgccatcggcgacgcccatgatcagcttacgggtgatgacgcgtttgaagttaatacggtaggtcacttttttcgcggttggcagcacctggccggtaaacttgacttcaccaacgcccagcgcgcggcctttgccttcgccacccagccaaccgaggtagaaaccaaccaactgccacatcgcatccaggcccagacagcctggcatgaccggatcgccgataaagtggcaaccgaagaaccataggtccggattaatatccagctccgcttccacataacctttgttgtgagtcccgccgtcttcggtcatcttgaccacgcggtccatcatcaacatgttacctgccggcaacggtgggccaccggcgccgaacagctcgccacggccggatgcttcgaggtcttctttcgtataggaatcgcgtttatctaccatgttctcagtaagccttattttaatgaaggacgcaggttagctaacacgtgtacgctgaacaagtccgatcagccgtggttgaaccagttgagccagcgcagcggccaaggacgacggcgttcctgcaggctcacctgcgcaatccgttcctgaatggccgccaacaaattcggctgttgttcgtcagagtagaggcaacctgtgagcaaaggcaaggcttccgccgcgctctctaccgcccacagatggaactgcccctcgcgcaccgcgtcgacgatatcttgacgcagacacagatggcgcacgttggtcacgggcaatacgacaccctgtttgcccgtcaggccgcggcgtacacaaacctcgaagaaaccttcgatcttttcgttaacgccacctatcggctgtacgttgccgaattggtcgacggagccggtgacggcgatctgctgggtgatcggttgctgtgacagggcgctgaccaatgcgcatagctcagccagcgaggcgctgtcaccgtccacttcaccataagattgctcaaagacgatggaagcggagaagggcagctgctgatcaagatccagttcggcgatcagaaacgcctgcatgatcatcatgcctttagcgtgcaggttgccgcccagttcggctttgcgctcgacgtcggtgaactcgccgtcgccgagatgcacaacgcaactgatccgtgacggttcgccaaagctgcgtggatgaccgggataatccaggactgacagaccgttgatctgtccgaccacttcaccctcggtttcaatcaggatctgacccaactcaatctcatcctgcatacgctcggccagatagctttcgcgccattctcgggcatttaacgccgcctcgaacgctttggccgtaatgcgatcttcttcggcatacagtgcggcttcggatagctgctggccaagccaaaccggcgagagtggtagaatgccctgatcgccactgtaacgcacagcctggacgatcagcggcggccaggcgtcgttcgccagcatcggcaattgctggtcggcaatcacgccgttgacgtaaccgcaccactgcgtcatatcatcaacttcagtcagctgcagatcgtcttcgaattcaccgtagatcgcttgttcactcagttccggctcgatatcgtgaaaatcggccaggccgtgacgatcgccgactacaatcagccgcagatccagcggcatcggtggaatggctaccggcagcgggcgggtttcgtctggcgaaacccagtggaactggcgctggccgatcatttgcttcagccgcagccacagcaacggctgagcaagcagcgcccgcgccgacagaatcagaatgccgccgttggcctggtgcaccagacccggctgcagggtaatgtcgccattgtggatccgtacgcagccaaacagctgttccggttcaatccactcctggaacagacaagcgccgccggcggcaaaaggttcatcgccacggctggctggctcgacgctgaccttgccatcctgaatgacatagtggctgccgcggcatgccgtatttttcggcagcagtggtttgacggcgtgagcgatcagttccagatactctcgcgtttcttgcgctttcaacagcatgaaacgcggtggcgattgggggtggcaaaatagcgtcagggcattttccagccgaggctgaatggcggaaaagggcacgggtgccaactgagcggcggtatcaaatatcgcctgataaggcgttacgtccggcaataaagattgccattcaagtcggttattggtcaaagtgttagatgcaatcgttaaaaagggaaagggcgattatacaagaataacggcggcttgatacatgtggagtgccagttggcatcagggagtttgacatcgcgcggtgactgtgcaaaaaacagtctaaaagacggtttaattgccggggaaattcggcgcaaagctgttatgcttatttgaagttacgcggtcactgaagagctcaagatgaaatatcagcaactggaaaatctggagagcggttggaaatggaagtacctggtgaaaaagcatcgggaaggggaactcattacccgctacattgaaaacagcgctgctcaggaagcggttaacgagctgctgaagctggaaaatgagccggtaaaggtacttgcatggattgccgctcatatgaatccggaactggataaccggatgaaacaaacgatccgcgcccgccgcaaacgtcattttaacgcagaacatcagcatacgcgtaaaaaatctatcgatctggagtttttggtttggcaacgattggctgccctggcgcgccgccgtggcgttacgctgtcggaaaccgtcgtgcagcttatcgaagacgctgaacgcaaagaaaagtatgcgaaccagatgtcgtcgttgaaagaagacttgaaggcgattcttggcaaagatcccaagtaagcgcgtgagaacgcccctatggcgccaggcattgaatgttctggcaacaagaggacgaaaaaaaaccccgcattggcggggttttttattaggcgagtaaacttagccctgaggctgagttacaacgtctttgatacctttaacttcgatctctacgcgacgatctggtgccaggcaagcgatctgagctttggtagcgcggccagatttgtagccacaggtgttgcctgtaactgcatctgcttcacccataccacgtgcagagattttgtctgacgggatacctttggagaccaggtagtcaacaacgctctgtgcgcgttgttcagacagtttctggttgtactggtcagaaccaacggcgtcggtgtaacccagaacaactacggagccgtctttaggatccatggagctcagctgggtgtacagctgatccagagcctgctggccttctgctttcagagtagatttgttgaagttaaacagcacgtcagacttcagagtgaaacgcttggtttcaacaactggagctggagccggagctggtgctggagcaactacgtcatcctgaccgaagcggtaagaaacgcccaggctcagcatggtgttgtctggacgtgcgccaacggtacctgcgtcaccgatgttgcttacgaactggtaatccaggcgggtagcccagtttttggtcagtgcgtattcaacaccaacagcagccagcggagaaacgccggtgtcgtggtcgctcagacgctgaccagtacggccgtagttagctttggagtctgcacgccataccataccacccagacgagtgtagatgtccagatcgtcagcaattgggtagctcagtttagcggccagttgaacgccctgcgctttgaaagcaccgttgttcacgctgcctttgtaaggcatgcggccgagccagtcatagcccagctcgaagcccaggtattggtttgcctggtagcccaggaacgcgccggcacccagctgatctttgtgggttgggccgttgccgataccgttctggtaaccgttaccgtagaaaccagtgtcgtggtactgggaccagcccagtttagcaccggtgtaccaggtgttatcttttggagcggcttgcgctacggtagcgaaacctgccagtgccactgctaatgcgatagctgtctttttcattttgcgcctcgttatcatccaaataggcaatgagctttaaagctgtttaagcccttggttaaattccttcgccaaggtttaagccctcgtttgttactcgccagtttttctgacgttatagagcaaccttggcgatgtaaagtctacaacgtggcgcgaaagttacaagtgtgatgtgataaggctctaaaaaaaaacgcggaatcgtacatatttgctaacattcttagcctaaaaaagcggcgattcatcgagcgtttttgcctgccaaaccgcagccggactcgctttttgccttctcccacaaaggttccgcttagggggtgcgaaaatgatgggaaaaatcctaaatttacttaatgatacaaagaagagtgaatttttagggtagaacagtgtccgtgagtcgggctaatgtcacgttgagggcgcatgataaacccataggcattacccaattctgccgcacgtcttaattttagacgatcctcctccgttagctcgggcaaccagccgagaaccacgctgtaatttcccgtttgtagcgctttttccatcgcctcgaccgtattcaccgggctgatctggctcagttgcaccattttatctacaggcagaccggattgctgcagccattgcttgcttaatttttgctgcggcgtcagccacagaagccagcgagactgcttgcccaattgcagcagcaggggcaacagtaattgagccactgcgggctggcgctcgttgtaaacaagttcactgatcaagccattctctttgccgatatccgtgttcttcgcaacattgcgcgttgtataagagccatggccgaaatgaggttggtagagtgattgagtacgcataaagttcccgcccgtcgtgttactgtatgtttatacagtatccctgatttaggataagatcaactcaaattttcgtaacggctcgcataattgcgatcattttttgtaccgacggtttttgtgattggcaggcgggcggatagtgcgtatttttctaattagttgttcacgttacttttttcattgatgagagaaataatacggccagaacctaaaaaggaggaacgctatgaaaaggatgtcgacgagaaggatcgcgcaggctaaaaattgctttgcggcgctgggcgccatcacaacacgatcacagtttggcggctatgggctgctggctgaaggggtaatgtttgcggtggtagcggaaggggaattgtacttgcgggctacggtgagcatggaaccggcctttcgtgcccggggcatggtcaatatggtctattccaagcgcggtgtgcccatcaccttgcgctattactgggttgacgagtcgctgtggcgggaacgcaacgagctggtagggctggcctggcaggccatcagggaagcacgccgagagcagcggctcaaggctggcgatcacggcagattgaaggcgttgccaaatatagatgtcaacatggagcgcttgctatggcgagcgggtattcgcaatgcctatgacctgcggctgcatggcgctaaacgtagctatcttcgcctgctgcaacagcagaccaatctgggtctgcgcgtgctgctgtcgctgggcggcgcgatagccggctatcatcaggcggcattgccgaccgaattgcgcaacgaactggtgcgctggttcgatcatacgatggctatgcgccgccatgggcatgagccagtagttcagggcccatcgagcgggccctgaataattaggttgccttattgatttgggtatggagtgcggtgagttccggcagcagctcgagcattagccccacctgctgcaaaaccaactgttctttgctttcaggttccggaacggctgtgcgaatgcgctccgccagctgttccagcgcttgcgcaatgcgctggctgttccgttcttcttgatgtaaggcgccgtccacgtaacacacggcatcattgagcagatcgagtgtggcaggggtattcaaccgctcgcggtgcgcccccaacgccgagatataactcaggagagtgtggttcaggcagagcagacggaaggcggcttcttgcaacgccttgtcggccttgggatcggcggacatgttggagatgaccgaagccagttctgcatcgctgttgtgggcatctcgccgcgcgatgcggtaagcgagcccgttatccttaccctgatgatattgcaccagaatggcgtccagatagcgacagttggcattcagcgttttatccactatcgccggcagttggcggaacttccagtccggccagataaagctgaccgccgcccaggcgatggcgcaacccaacaaggtatcgtaaacgcgcggggctgctacttcgaaaccttcacccaacaggttaaagcacagcaacacaagcagcgtaatgaacatcgttgcatgggcatactgcacggtgcgaaaagcgaagaacaggacaccggtgatgacgatcaacaccagttgtccttccacggaaggcacgaaatagaggattggcaggccgatcaggataccggccagagtgccgatgatgcgcagcgccaggcgccggcgggttgcgttgtagttcggttggcagacgaacaggctggtcaacaggatccagtaaccgtgttgcatgccggtgaactggatgaaggcgtaacccacgcacagcactaccgacatgcggatcgcatggcggaacagggccgactgcggcgtcaaatggcggctgatgcgcagtcggatgtcgctccagccggttaagcgatcgtcggccaggctgttctcttccgcctgcccgctggccagcgtctgctctgactcgatattggccagttgcgcatcgatcgcatgcaggtttttcagcaggtgcgccagcgctttggtttgctctgaattgccctgggtttcggttatgcgtgccaaggcctcctgaatgcggctgaaggctggctcaaaacgcgggttgtgctggtatttttgccgcagcaggatcgattgtgccagctggcggcaggcgcgcgcctgcatgctcagcaaacgctggaagcggaataaaatatcgctgtgacggaattgccggctgagcgcgtggtactgaacatgggaagagctggcgcgttcgtggatatcctgcgcgacaaaatagtagtgcaaggtgcggcgggtgccgcgttggccgcgatcgcctttcaggcgcgtcagcagcgaggctttggtctggttcagcaacgcgaccaacgcgctgttggccatcgcgacatccatccatggcaggtcggcgtcgcgttcggcgtcgggatcgaacaggttggccttggcatccagatagttggccagctgctcgtagcagcgtgccaggttctcttgcagcggccggatagggaacagcaggtggcccgccagcgtcagcaggttataccacagcgcgccgatcaccagcagcagcggttgctgataccaggcatcgtacatggcggtgccgagcatggtgtaaaccgcgatcagcagcgcgccgaaggcgatggtggcgtaacgttgccctaaggcgcccagcaggataaaaccgcaggttgaggtggttaagccaagggcgaacaaccagggatagggaaacagcagttcgattgaagcggaggcgacaaagaagcacaccaacgtgatcagtaggttgcgtaacctgccggccaggcggtcgtccaaatcggtcagtgccgctgccaccacgcccagcgtcagcgggatagtcagcttgggaatgcccagccaccagggaacggcggtggtgccgatcagcgcaataagaatgcgcaggtggtacagcagattgctgttgtaggtataacgacgtactgcgggtgcaaaagagagcacaaaaaactcctcaaacggagaaaaaattaacgctgatgatagtggcggcgagcattctcaatacgcgcttgctgagccatttctaccgagacgacgcggcgccccaccggccacagcgcgatggcggctattttgaaattggcgataccgaccggaatgccgatgattgaaacgcattgcacgataccggcggcgatgtgtgacaggcacagccaccagccgaacagcaccagccagataatgttgagcagtgagccgccggcggagagcagcgcattgcttttctccgggtacagttcatcgacatgtatcgcctcgttgccgaacggcaccagtgacagcttggtgatttcccagcaggagcgagtgagcggcagcgtgatgaccagtagcacgctgaacactgtcgcaatgagccagcctagcgtggtgaagaaaccgcccaacacaaaattaagaatattcagtacagtacgcatagacgtcattctgctctaatgatagccaaaccgcgatgcgggcgtattcacgataaaaacgcaaaatctattctaccctttttttagcgctagagtgccactgcttatcgcaggtaaactggcagatatccgttatttactctcaacatagtcatggcgcgacgatatggaacttaaagcgacatcgctggggaaacacctggctcagcacccttataaccgcgtgcggttgctgcacgccggcgttgaggtgagcggggaaaaacatgaatacctgatccccttcaatcaactgattcaggtcaggtgcaagcgcggcatcgtctggggcgagctggaatttgaattgccggacgaaaaagtggtgcggctgcacggtaccgaatggcaggaaacgcagcgtttttatcactatctgcagcaggcgtggcagcactggagcgccgaaatgagtgaggtcagcgccggcgtgctgcaacagcaggtggcgcagattcagcgtattgagcagcaagataaatggttcaaaaagtctgagctgggcaagctgcagcagcaaattcgtgaggctttctccgcgctgccgatgccggtagcgcgcctggatgaattcgataactgccgggccgattaccatctgtgtctgcaatggctgcagcaggggcaacgcagcgttgaacaacgcaaccggcagtggaccgatcgcatgctggagcaacatcacgacttcttccagaccgtcgagagctcgccgctcaacgacgcccagagccgggcggtggtcaatggcgaggattccgtgctggtgttggccggcgccggcagcggcaaaacgtcggtgctggtggcgcgcgccggctggctgctgcgccgtcaggaggcggagccggggcaaatcttgctgttggcgttcggccgccaggccgccggcgagatgaacgaccgcatcaaagaacgtttgggcgatgtcggcattcaggccaagaccttccatgccttggcgctgcaaatcattcaacaaggcagccgcaaagcgccggccatcagcaggttggaaaccgatgccaacgcgcgcaaagcgctgctgattacccattggcgccaacagtgcgcggagaagaaagcccaggccaaggggtggcgtcaatggttgaccgaagagctggaatgggaagtgccggaaggcgacttctggcaggataaacgtctcgcggatcggctggcgggccggctcgagcgatggctggggttgatgcgcatgcacggcggcagccaggcggaaatgatcgagcaggcggatgaagaaatccgcgatctgttttcgaaacgcatccggctgatggcgccgatgctgaaagcctggaaaagcgccttgaaagaagaaggggcggtggacttctccggcctgatccatcaggcagtcaacattctcgacaaggggcgcttcgtcagcccatggaaacatattctggtcgacgaatttcaggatatctcaccgcagcgtgcgttattgctggcggcattgcgccgacagaacaagcagacctgcctgtttgcggtgggggatgactggcaggcgatttatcgcttcagtggcgcagagttgacgttaaccacggcttttgccacccacttcggcgaaggggcgcagtgcgcgctggacacgacttatcgcttcaacgaacgtatcggcgaggtggccaaccggttcgtgcagcagaatccgcaccagctgaaaaaaccgctcaacagcctgagcaagggcaataaaaagtcggtggcgatcctgccgcacgagcagttggaacccttactggacaagctgagcggctacgccaagccagatgaacgcatcctggtgctggcgcgttaccaccatctgaaaccggaagcgttggcgaaagcggccacccgctggcctaaactgaatctggagtttatgaccatccacgccagcaaggggcagcaggcggaatacgtcatcattgccggtttgcatgaggggcgtgacggtttccccgccgtggcgcgcgagtcggtgttggaagaggtgctactgccgcggccggaggatttcccggatgccgaagaacgccgtctgctgtatgtcgcgttaactcgcgctaaacatcaggtatggctgttgcaggatcgtgagcacccttcggtattcgttgaacacctgcaggatcttggcgtaccggtgcagaaaaaaccgtaagctcgggcctggcggcagccaggccgtgaggactacttcaggcggtcttgcaggtagcgctgatagtcggggatagcgatctccacctcgcttttgaacagcggagagtcgatcagaaagtccgcggtcgagcggttggtggccaccggaatattccatacggtcgccagccgtagcagcgccttcacgtccggatcgtgcggcaccgcgttcaacggatcccagaagaagatcagcatgtctatcttgccttccgcaatcagtgcgccaacctgctgatcgccgcccatcggcccactcagcatgctggtgacgggaatgccgctggcgcgctgtatcaggttgccggtcgtaccggtggcgtacagctgatgctgcgccagaatagtcttgtggctttctacccactccaacagggcctgtttgcggtgatcgtgcgccaccagcgcaatgtgtttgcgcgcggcgatagtgcgggtagtcaattccatctcggtgtccttcgctaatcagggggatgtgcgacagattactgaaactgtttttcactgcctagcgtttgcgcttgaaaatgcgaagaaaaggcgcctttgcggggaaagacgccgggagggatcagcgaatcggttgtttattggcccagcgcaggaagcgcttctgtgtttccttgtcggcctgttggaaccagtattgcaacatctgttccgacacgttttcacctttcaacgtcaccgtcggggcattcagcggtgcgccggccaacgcgggggttgagggattgcctgcgttcgcctgcacaaaggtcggaacggaggctgggcggttctggcggttgtaatcggtcatcaccttttccaaatcggtattgaaggtgacgctgtcgggatgcagcgcatcatgccggaatggcaaggcgttgccgtctttatcgaccaccagataatttaacgttctgtcaaagcgttgcgcatcacgatcgttctcgatgcgcggcagttcgatcgccacttggctgatcttttgcgtattgaagctggcaaccagcggcagggaggtataggcctgtgtatgctggccagaacgtacggttttggtcactttaaacagcaactggtgctgcccgccatccagttcaaggctgtcggcaccttttaacaacgaacctgtcattttcttgccgtcgaccaccagcaggtcgatgtccggggagagtttcagggtcgtagccgcggcaggcatactgatgctgagcaacgccgcaaccaccagaccaaatttcatcattatctccttataaagtgacgtagctctaagtgttgaacacggcataggttgtgtcaaaatttttcaatcgggtattttgtttacatttttacatattttatcgcgattagacacgaccgtgcgcagctgaaccgcgacagcctctgaccataagattgcggtgaagtttccttcgcattagcgtttaaccgagcgaatgccgatcggttacactcgaaatggaaagtgacgcagtgataaacgggagttgaagatgcaagatcaagagattgttgagctgttgcagcaggtgaaaaccatcgcgctggtcggcgccagcgataacccgtcgcggcccagttatggtgtgatggcatatctgttggcacaagggtatcaggtgatcccggtcagcccaaaactggcggggcagacgctgctggggcagcaggtttaccctacgctggccgctatcccacagccggtggatatggttgacgtgtttcgcaattcggaggcggcttacggcgtggcgcaagaggcgatagcgatcggcgccaaggcgctgtggttgcagataggggtgatcaacgatcaggcggcagcgctggcgcaacaggctgggctgcgcgtggtgatggatcgctgcccaaaaatagaaatcccgcgtttagggctggagcgctaaataaaaaaagggcctggcgcgatgccgggccctctcggggtttctcaggtcttggcgcggtcaattgcgcaaacgtggcgcctgtaactggtgacggatggattccgccagttcatccagcgatggttgctcggggtgcgcctcctggggctcaccatccagctgcgcttccgccagataggtgtgcaccggttggccttcctcgtcttccatcaccacgtggtaccaaggggcggaacgcagttcgtcgttcgccgctatctcgtcagctttgggttgttctaaagagtattccgggtcgatatcgataacgacccccaaataccccagcagtttatgcctaacctgttgtccgataccgaatttgctggcaatcatgatgacctcctgagaaacaatgccttgctcatatatgggggcaaggcagcgcatttcaagttacatcacccgacaagcgaagcctttcagatacagcccctcaggatacgtggcgatcaccgggtgatcggcagcctggcggaactgctctataaattgtacatcacgtccggcatctacagcggcatcggccaaaattttctggaacaggtcggtcggcatcaggccggagcaggagaagctgagcagaatgccgcctggattcagcaactgcagcgccagcatgttgatgtctttgtaaccgcggcaggcgctggccagctgattcttgttctcgacgaacttaggcggatccatgatgatcagatcgaatttttcgccttgagcgcggtagttgcgcagcagctggaacacgtcatcgcgaacgaactccgccttgttcagatcaagcttgttgagttcgacgttctgtttggcgatgtccagcgccgcctgcgaggtatccacgctgatcacctgcgcgcagccgcccatcagagcggaaacggcgaaggcgcctgtgtaggagaagcagttcagcactcggcggccggcagagtagttccgcgccgccaggcggctgtcgcgttggtcgaggtagaaaccggtcttgtgcccttgctgaatgtccaccagcagcttcatgccgtgctcggtaataggcagcagttccggcggcagatcgcccagcaccgggccctgcgccagcggcaggccttcttttttacgtaccgcaacgtcggagcgatcgtaaatcgaacattccgggtagcaatgctgcagggcggaaagcagggccgggcgctggtattcggcaccggcggacagcagctgcagcaccaggaaattctggaagcgatcgatagtgatgcccggcaggccgtcggactcgccggcgatcaggcggtatccgtccagaccgtcacgctgcgcgacccaatcacgccagctttgcgcttgctgcaggcggcgaatgaagaaatcgatgttaatgtcttcatcctgttggaaagtccagacgcgtgcgcggatctgcgactcgggcgaataggcgccgcgcgccagccacttgccctggctgtcgaggatatcgatggtttcaccggagagggctttaccctcaacacgttgaacggcgccggagaacacccaagggtggcgacggagtaaggacttttcacgtcctttggcgagaaacaggcgtacggtcataattaataatgctgccagctaggatagaaagagtgacacggcggtgcaaaggcacggcaatgccataatgaaaactgaattaagggggcgattatgacacaagtttgcattgctgcgtatgtgtatggcgtggtgcagggggtagggttccgctattccactcagcggcaggccgaggcgttgggggtgaccggctatgcgcgcaatctcgatgacggcagtgttcaggtggtggcctgcggcacacaggcgcaggtggataagctggtggagtggctgaaacagggcggcccgcgcagcgcgcgcgttgaacgcgtgctggtggaaccgcagggggtggctgattacgccgggtttggcattcgctattgaatgttcgcctgcagcggcgctgcgggcggcgcggtcagatgcatttcaccggtttcggcaagccggcgattttggtggcttgtttggccggccctttcggaaacaggcgatacagatagcggctgttgcctttttcttcgccgtatttctgcgccatggctttgaccagcatgcgaatagccggcgacgtattgaattcctgatagaagtcgcgcacgaagcgcaccacttcccagtgtgcttcggtgagcacgatctcttcctgcgcggccagcagcggcgccaggccctcatgccagtcggcgctgtttttcagatagccctgcgcgtcagtgtcgataacctgaccttcaaactccaacatactgcctcgataacggataattcggaacggccgccagtttagcaaattttttcggccgccaaaaacaaagccccgccggagcggggcctggaaggcatgcgtaacgcgcgatcagttgctgcgggcgaagcccagaatgctcaacaggctgatgaacatgttgtagagcgacacgtacaggctaacggtggcgcgaatgtagttggtctcgccgccgtgaatgatgttgctggtttcccacaggatcgcgccggcggagaacaggatgaacagcgcgctgatagccaggtgcagagcagggatctgcaggaacaggttggcgatcaccgccaccagcagcaccacaaaaccggccatcatcatgccggacaggaacgacatgtctttacgggtggtcagcacatacgccgagcagcagaagaacactgcggcggtgccgcccagcgccagcatgatcagatcgcccgcgccggcgttcaggaacgaactgaggatcgggccgagggcgtatcccatgaaaccggtcagcgcgaaagccgccagaatgcccgccgggctgttggccagtttatgggtcaggaacatcaggccgtagaaaccgaccagcatcagcagcaagcctggtgcaggcagacccaacattgtactggcggtcgcggtcagggctgagaaagccagggtcagggataacaggaaataggtgttgcgcaggactttatgcgtgctgagcagcgagtcgcgcgaagaagatgagacgacaatgcggtccataatgctctctcttatcaggccatcacaaaataatcccgatgataggcagcgcaagggcttgattaaagtttgtttaccaatctttacccttagttatcattatggcaacagcggggtgggtgttcgtttgatcgccgcttgctttgcctgcggcgatttttcgcgcggttgaacgcgttcgggctttacaagcgaataaggtctgtttatagtgcgcgtcgttgcggaggggtggccgagtggctgaaggcaacggtcttgaaaaccgtcgacgggaaaccgttccagagttcgaatctctgctcctccgccatacattctgaccccgtgctctctgagcacggggttttttgcttttgcgtgcggataaaccggggcgcttctgcaggaaacgcgatcggctattgataagggccatgcgtcggtgagattatgcacctatcaaggccggccgctcggatgcctgcagttgccaggcgttaccgttgcgacaagcaacgccgccttatcaatttcgcttaatgctcttatggagacagagatgaactggtatcaagtcgccttatggaccatgatttttctcaagtccggcgctttcctggtgttcgtatggtggtggatgttcaaacgtgcgaccaaaccctatgagcgtccgaaagacgtcgtggtggacgatacgccgtacgatgagaacctcaccatggaagaggtgatgaaaaaccatggcatcgtccgcacggatatgtcggtaaaatagtcctcccgcctccccaaccgttatctggggcgtgtttgccaagagcgcgcccccttgtgtttcttcgctgtctctttatggcattctgctttcacgttaacggcataacgtgaccgggaaaagcacgccatgaacgatgtacgcatcctgtcgcactttacgcatcgaaaaaacgccgttcttaatgccgagagagatcatggggatttctttggtcagctcatccggcgcgttatcgtcgggggctttgctgatttctcggtgggtggtcatgtaaaacccgtgatccaacctctttatatcaaagtttatttttctatccaggctgtaggtttttcctcccacggtaatgtccccacgttgaacgatcatggcgcgatgctcgtcatagatgaataaactgcccgtcacttttagttccaggtcatcgcctgaagctaatcgtttttttgtgatcgtatcggcttggcaattcatatgtacaggtgcgtcgggtgtgaaaacgcgaagcaggacaatgaagagaatcactgccaaaaatccgataatcagtatttttgggttgcgcaatgcggccatttattttccattgagaattttgtaggtaacacactgggtatatcgaccttgcgagccgagatagcatacaccgaggaaggtgttataaatcaacgtatgtttttcggaggaaaaatagatatccgccttactggctagacaatccacaccgctgccttctaatgcctggttgaccatgcgcttttccagttcgtcatcaatatgtttatctgcatccagagaatataaggtgcaattttctttttttcctaacgcaactaaattctcccgaggttgatcagcaggttcgataggataaagcgtcgctacgatcaacagaggaataaatacgcagcagacagtggcaacagcgctaacctttacctttttctgcggcggcaccaggtgtggttcggcaacaggtgccaggggcgaaagcggctctgaagcataagaaggcggcgtttcgctgacggttacctgcggtggcggataaatttcaatcatagcggtgaaacaaaacccgactttcgccagggtttttattggggaggtctctctacccagaagcttgaatgctttccttatttcactgacggctacatttagactgatcgatgagcctgaaaaaccatactcttcccataccttttttatcaacatctcacgtttcaatgggatattggggtgagtcagcatttcaattaacaggcgtgaagccgggttggatatccgtatcgatgactcatcattatcaatgagttggagacgacacgcgtttgcgtcatagatcacgcagaggtcgataatatatttcatgtattcaggtttttataatgatataggcttccagttcgcggctagtatttagtgaaacttcgggtaggtcaaggttctgggcggaaaacataaataatcaaggacgtttttttattttctcggcgaacggaaaacgcagtcctttgccgttttttatgtcatttttggagttaaattctaaaaaaattagtttttacagattataataattaaaatttaggttaataaaaataatgttcctgtcgttaatgatttgatgcagaattatcttagtgtttacggcgcttgtttatgtgccaatcgcttattgtttgctcccgaacggcaatgtgagttttccaaggaaaagacaggtatttagtgcaaagtatcgacgttgtctttggccatggatggaggaagtatgctcagtatcggtatcgtatctgaaaacattttcttcagagaggcgataaaaagaatattgatgccaaggatttttcataaagatcacgttattgcctactatgacgatctgcctttggctatggggcgaaattgccacgatattctgatcgtcgatgatgcggtaaaaagcatgttgcgtttcagtatggctgtcgcgttattggctgctattcatggtgtaaagatttttttgacgacggaagagaagcgccgtctgttatttcgttctgtctcgcatgatgtcgtcgtgctcgataaaaaaggcagtgtccccggcatcagtaaagagctgtcttttctgatggataatatctcgcagcgccctgcattgaatggaggcgttgcgagtggagtgggccgccatacgaaaagttgtctgacggaaagtgaagtggaaacgctccatttgctttccttcggctatacggtgactcaggtttccaagattcttgataaaagcgtaaaaacggtcagtacgcagaaatgcagtgcattacgcaaaatgggattgaagaatcgggtgcacaacttactggaaatctcatccggtttctcggaggttccctagagattcgttattttcatcgtttttattgtcgggtgattaataacgctattgcttgattttataaaaacaggaatgtgttcatccttttgcctctgtattacggggaggggtttctttatcccgccggcagcggctgatttttatttattctcttaaaccaaactgttatggagttttatctcatgatgaagaagatgttttctgttgcaatcatggcggctgcggtcgctgcgccaacggcttttgctgaagacaattccgccggtggcatcattaactttaccggtgccattaccgacaccacctgtacgattaacggcggaaaaagcgcggatttcaccgttgcgctgagcccgatctcggtgaccgacgcgggtaacgccgttgggccaatcaccaagaacaagaagtccttctcgctgaccttctccggctgttcgccggcggccggcactgcaggcaccccgctgaaaatctacttctcctccgcggataacatctccaccgacggcaaatatttgctgaacaactcggtcaacgagaacgacgcttccgttgcgaagaacgtgggcttctctctggctgaaaccggttcttccaccccgatccagctgaacgtgccttatgtcaccgacatcatgggcgataaagcggcaccggattcagaaaccctgacgctggacgcgtactactacaaaaccaacgctgaagcggcaaaagtgggcgctctgagctccaacgtgacttacaccatttcttacctgtaatcgcgctgaaagccaggcccttgatgggcctggccacccgggggaacgatgaaaaaatatatgatgatagcggcgctgttgctcggttccgttggcgcgcaggccaatgtggtggttaacggtacgcgggtgatctacccggcaaacaacaaggatgtgattgtccaactgctgaataacggtgccgatccctcactggttcaggcctggatcgacgacggcgacatcaattccaccccggaaaccgccaacgtaccgtttttgctatcgccaccggtggtgaaagtgaacggcaacagcgggcagcagctgcgcattcagaaagtcggcgccgcgttggcggcggatcgtgaatcggtgttctatctcaacgtgctggatatcccgccgacgccggaaaacctgcagggtaccaatacgctgcagctggcgatcaaatcgcgcatcaagctgttctaccgcccgcaggccttaacccgcggcgtagaaaacgcattggaaaaactgacgctgcaagccaatggcaaggggttcaacgtcatcaacaacagcccgtatttcatcacggtagcgaatatcggccagggtgaggacaagcatctgctggttgattcgctgatggttgcgccgttttccactcagtttgctgccagcaaacgatcggtcagtaaaaacgcgcgttatgacctgatgtatatcgacgatctgggggcttacaagtctaaagccatcaccgcacactaacctgaaagaacaacaatgaagctgaataaaaaagtcctctcgctgctgaccgcctcttcattcttgttgccggatacggcctgggcggtgacgttcgatacttcgctgttggccggcgaatcgcgcgattccgatctttcgcgtttttacctcaacaatgatatgcctgccggccggcaggagatcgatgtgtatgtcaatcatgactggaaagggcgctacgcgctgctgtttggcacgcaacgcgacgatattcaaattgcctaccaggatgcacagcggttgggcatcgatctgagtcaattgccgacacctcaggcgccccagacgacgctgtcgatcgcctcgctggtacagggcgggcggttcgatatggacgtcggcgcgttgagcctgcggttgacggttccgcaggcgcgggtcaaccgatcggaagcagggtacgtggatccggctttctggaatcgtggcatctccgcgttgacgctggcctacaacgcgacctactaccacgccgaggcgcgtggcgaaggcaatcacagcaataatgacgatttttataccgggctggagtccgggatcaatctggccggctggcaatttcgcgacagcagcagctttcgccacggcagcgggcgggggagccagtggcaaaacaacacgcgttatcttcagcgcgggttcgccgacatcaaatccaacctgaccgccggtgatttttattcgccgggggagctgtttgactcggtacgcattcgcggggtggcgctggcgtcggatatcagcatgcggcccaactcgcagcagggtttttcaccgattgtgcgtggcgtggcgcaatccaacgccctggtgaaagtggtgcagaacggcaacgtgatctaccaggaaaacgtgccgccgggcgcctttaccctcgacagcattcagccgaccggttcggcgggcgatctgtgggtgacggtcaaagaggctgacgggcgcgagcagtcgttcagcgtgccgttttcagccgtacccaacatgttgaaacagggtgtcagccaatacagcgtactggccggcaaggtaaacgaaagcaataccgattacgaacccggctttgtacagggcaccctgcagtacggtttcaacaatctggtaacgggttatgccggcagcattttgagcgacgactatcaggcctggctgctcggcagcggctggaacctgccgataggggcggtgtccattgatctgacacatgccgatactcgcctgaaaaaccgccgtgaaagcgggcagagcttccgtatcgcctacagtaaatttctcgatgtcaccgcgaccaacttcacgctggctgcctatcgctattccacccgcggttactacagctttaccgacgccatttactccaatgacggctatcgccagctggagcgtcagtttgatcgctggcgcgacgaggagggcgtgtccgaactggatatgaacacctgggatgcgctgcgttcggctcggccgaaaaatacctttacgctcaacctgaaccagcgtcttaacgaaggatggggcacgctgttcttctccggctcccagcgtgattactggacggccaatgcgaaaagccgcgaataccagctggggtactccaacaatctggggcgcgtcagctactccgtttccgccagccgggtgcgcaatagccagcgtgaggaagagacgcgctattacctgtcgttcagcctgccgctgtcggtgttcgataacaacgcctacctcagcaccggcctgtctgcgacagactcccactatcagcaaagcacggtcagcctgagcggcaatgcgctggagtccaaccgcctgagctactcgctgagcggcagcaatcgcagcggcggtgacaatatggccagcgtcaatgcggcctatcgcgcccgcgcctcgacgctgggcgtctcctacagcgaaggcaacgattatcgtcagagcggcctcagcgcgcgcggcagcctggtggcgatcccctggcatctgctggcgtcgaacgagatcggcaacaccatgacggtggtcgaggcgccgcaggccgaagggctgatggtcaacggcgacgaaagcatcgtgaccaatgcgcagggtttggcgctggtgccttatgccacgccgtaccggcaaaactcggtcacgctatcggataccggccacagcagcggggcggaaatcagcggcaacgtcgccaaccatgtgccttactacggcgcggtcagctacctgaaattcgagaccgatcaacgtcggccattccagctgcgtgcgcagcgcgccgatggtgcaccgctgccgttcggcgccgaagtgatggatgaaaacgatcggtcggtaggttttgtcggccaggccagcgtgttgtacctgcgcgccgaacagccgccaacggcgttgacggtgcaattgcgcgacggcagttgccacatcgccaaaccgaatctggcgctggatgcgtcgcccggcgtttgccgctaatacaggataaccgaatctatgatcaggctgatttttttgctgctgctgtccgggttgttcagcggctatagctatgcttcctgctatggcaagggcattgagtacgcccctgcgctatttgtagacctttctgacaaactgagcgccgctaacccggtctgggaataccagacgtctacccaatatagcgggactttccgatgttcaggccgcaaattcgaattttcctatacgccggtgctgtcaccgaaagataaatatgccacctatatcggtttcaatgatggcaagcagtgggtacgcgctgaaatcaccaatgacatcaagaatattacgttaagaggggcgggaagccattcggccagcgaactgaatacaatgatgacggtgcgattttcgctggtgcaaaaacccaaagacgggttgttggtcaatggcgatagctatccgtttgaagacgtgctgttcgtcagtgatatgagcggtatgtcattgggagagatccttggctggccgttaaaaatgttgagcaaactcctgtcgtggatcgcgagcggttttcgaaaatggccttatgacgaccgtgatatgtacggtcaaccgatgacggtgaggtacgcgccgaaaaccaccacctgtcatttcgacaatgccggcctgacggtcaggttgcccaaaatgggcgtggcgcaggtgctgaataacaatcaacccggctacacgccgttctcgctgaacatcagctgccagaacatgcagcaggaaggcatcgcggatcgcgccgttgagatgttcctgtccagcaataacctgctggcctctgacgccagcgtgttgaccaatgccaatgcgggcggtgcgcaaggggtggggctgcgcctggtcaagcgcgacatgccgagctcgccggtggtattgtcaccttccaacgtcgatcgcggcagcgccacctcactgtttcacgtcgccgccggcggcagcctgaacagtcatttcatcatcggcatgggcgcttattattacccttatcagcgcgatggcgtgacgcagggggaactcaacacctcggccacgttgaacatcatctatccctgagaggttcgggagaaccggtgcgcaacctgtttcgttcaccggtgttccgtcgggtgttcgaaaatatgtgcgccggcgccctgttggccaaaaatatcgtttgggttgcgcagcgggcagtcggcgagcgacaggcagccgcagccgatgcagctgtcgagatggtcgcgcagcatggtcagtctttgaatgcgctcatccagcgttttgcgccaggcggaggacaacacgccccattgctccgaggtcagcttgctgccggcgggaaagcggcccagcgtggcgcggatctcctccagcggaatgcccgcgctttgcgcgatcttgatcaccgcgatgtagcgcaacaccaccggcgtgtagcggcgctggttaccggcgttgcgcgtcgcctgaatcaaccccttgctttcgtaaaagtgcaacgcggataccgccacgccgctgcgcttcgccacttccccaacggtcaatagccgataggtgttaatcggttcatttcttgccattccacattcctcggcttgacctcaagttaacctgaggttttatagtgcagccagccgggcttggcaaccggcatctttcgtcacttgcctgcgctgcgtcgggggaagggtggctttggctgtaaaatcaggaagaaaccgttacatgatgaaacgatacctcattattgccgcgctgctggcggcgctcgccgtcgctgcggtagcgatgcgatccaccgcgcggcaaagcgaaggcgcgccggcctatccgccggtgaaagtggcgctggcgcccgcactgcgtgaacaggcggcgcgcagttacgccggcgtaggcgagctggaggcggccagccaggtggaagtggcggcagagaccagcggccgcatcacgcgcatcctgttcgaatccggccaaacggtacggcaggggcaactgctggtgcagctcaacgatgcggtcgagcaggctgagctggtgcgcctgcaggcgcagctgcgcaatgccgatctgctgctggcgcgcatgcgcaagctgatgaacctcaacgccaccgcgcggcagcagttggacgatgcgctggctgaacgggatatggcgctcggtgcggtgcaggaaacgcaggccaaaatcgcgcaaaaggcgatccgcgcgccgttctccggcgtcatcggcattcgtcgcgtgcatgaagggcaatacctcaacgccgccgaggcggtggccaacctggtggacgccgatacgctgcgggtcaatttctcgctggacgaacaaagcagcgccgggttggcgctgagccaggcggtatcggtgcaggtcggcgcctatcccgagcgcgctttccccgccgctattaccgctatcgatccgatgatcggcaaatctcgcaccgtacaggtgcaggcgacgttgactaaccgccagagattgctgaaggccggcatgtacgccggcattcgcgtcacgcagcagcagcgcgtggcggtgctgacggtgccggaaacggcgctgacctatacggcgtacggcgacaccgtgttcgtcgcgcagcagggtgaaaagggcatgacggtcaagcgcgtctcggtcaccgtgggtgagcgcaacgacgggcgcgtcgagatcgtcagcggcctgcaggaaggcgaccgggtggtgacttcgggccagctcaagctgagcgacggcatggcggccgagccggtagcgcaggatgctctgaacgccgcccaggccggttcctgaggagagaccgatgacatttaccgatctgttcgtgcgccggccggtgctggcgctggtggtcagcaccttgattctgctgttcggcgcgctggcgctcagcaaactgccgatccgccaatacccgctgctggaaaactctaccatcaccatcagcaccgactatcccggcgcgtcgtccgagctgatgcagggctttgttacgcagccgatcgcccaggcggtgtcctccgtcgagggcgttgactacctttcttcctcctcggtgcaggggcgcagcgtggtgacggtgcgcatggcgctgaaccgcgactccacccaggcgctgaccgaagtgatggccaaggtcaaccaggtgcgctataagctgccggagcaggcttacgatccggtgattgagcgttccgccggtgaagccaccgccgtggcctatgtcggtttttccagtaaaacgctgtccacgccggcgctgagcgaatacctgacgcgggtggtggaaccgatgtttaccaccatcgacggcgtcgccaaggttgaagtgttcggcgggcaaaaaatggcgatgcgcctgtggctggacagcgatcggctggccggccgcggtctgaccgctgccgacgtggccgatgcggtgcggcgcaacaactaccaggcggcaccgggcaaggtgaaagggcagtatgtggttgccaacgtgcgggtgaataccgatctcaccagcgtagaggagtttcgcaatctggtggtgcgcaacgacggcaacggtctggtgcgcttgaaagacgtcggcaccgtggagctgggcgccgcagccacggaaaccagcgccttgatggatggcgaaccggcggtgttccttggcgtcttccctacgccgaccggcaacccgctggtgatcgtcgacggcattcgccacctgatgccggcgatcgacaagatgcagccgccgggcgtgaagatggcgctggcgttcgagaccgcgcgctttattcaggcctcgatcgatgaagtggtacataccctgctcgaagcgctggcgatcgttgtggcggtgatctacctgtgtctgggatcgctgcgcaccgtgctgatcccggtggtgaccattcccttgtcgattctcggcgccgccgggctgatgctggccttcggcttcagcgtcaatttgctgacgctgctggcgatggtcctggcgatcggtttggtggtggacgacgccatcgtggtggtggagaacgtgcatcgccatatcgaagaggggaaaacgccgctggcggcggcgatgatcggcgcacgcgaggtggccgggccggtgatcgccatgaccctgacgctggccgcggtctatgcgccgatcggcctgatgggcgggctgaccggcgcgctgtttcgcgaattcgcgctgacgctggccggggcggtggtggtgtccggcgtggtggcgctgacgctgtcgccggtgatgagttcactcctgctgccggccaaacagagcgaagggcgcgtggcgcacgccgccgagtggttcttcggcggcctgacgcggcgctatgcgcgcgcgctggatttctcgctgcatcaccgttggctgaccggtacgctggcgctgctggtgatgatcagcctgccgctattgtacctgatgccgcagcgcgagctggcgccgaccgaggatcaggccatcgtactgaccgccatcaaggcgccgcagcaggccaacctgaactatgtcgaacgctttgcctacaagctggacgaggtttacaaccgcatgccggaaaccgaaagccgctggatcatcaacggcagcgacggcacggcgtccggcatcggcggcatcaacctgacgctgtggcaggcgcgccagcgctcggcgtcggcggtgcaggccgatctgcaacgggcggtgaacgatgttgaaggcaccagcattttcgccttccagctgcccgccttgccaggctccaccggggggctgccggtgcagatggtgctgcgtacgccgcaggactacccgcagctgtaccgcaccctggaggaggtgaaacagaacgccagaaacagcggcctgtttatggtggtggacagcgatttggactacaacaacccgctggcggaggtgcacatcgatcgcgccaaggccaacagtctggggatacgcatgagcgacatcggtgaatcgttggcggtgttggtgggagaaaactacctcaaccgcttcgggatggacgggcgcgcttatgacgttatcccgcaaagcctgcgcgaacaacggctgacgccgcaggcgctggcgcggcaatatgttcgcgcccaggacaatacgctggtgccgctctccaccgtggtatcggtggccgttaaggtcgaaccgaacaagctgacccagttcaaccagcagaacgccgccaccctgcaggcgattcccgcgcccggcgtttcgatgggcgaagcggtggctttcctcgaacggcaggccaatgcgctgccggccgaatttagccacgactggcagggggattcgcgccaatacacccaggagggcagcgcgctggcgttcgcgttcctggcggcgttggtgatcatttacctggtgctggcggcgcagtacgagagcctgaaagatccgctgattatcctcatcaccgtgccgctgtcgatctgcggcgccttgctgccgctggcgctgggctacgccacgatgaatatctatacccaggtcggtctggtgaccctgatcgggctcatcagcaagcacggcattctgatggtggagttcgccaacgagctgcagatgcatcaggggctgacgcggcgcgccgcgattttgcaggcggcgcaaattcgtctgcggccggttctgatgaccaccggggcgatggtgttcggtttgatcccgctgctgttcgccagcggcgccggggctgccagtcgcttcggcctggggctggtgatcgtctccggcatgctggtgggcacgctgtttaccctgtttgtgttgccgacggtgtatacgctgttggcgcgtgatcacgcggtagcctcacctcgtcagcgtgagttggccgccgcgcaaaaggcgctgacggaataatccgccggcgcccgcgtgaagaataaacccgcttcggcgggttttttcgtcagtttttgcagcccatcaactccggcagaacgccgggtttgctcttcagcgaagcctgcacgtcgtccggcagaccggcccagatgatcaggccggtgcgtttctcgatctcgtccaccgtcacgcggaattggcagaaatcggcgcccttcggcgtgttctggtcgaacaggaaggcggcatagtggttcaccgccgggctgttgttgatgaaaatcaccttccagtaggcgctggggatggtgtgcgctttctgggtgcccggcagtttgcccatatcgcgctcatacagcggcccggtcacggtatagaccgaggagatatcggcgcgatcgatcagcttgcgttcctgatcttccagccgcgcccaggcgccctggttcagatcggacttttgcggcgtgatgttggacaggtagttcaacgattcccagtcggagacgcccgccagcgaggccagcggcgcctgatgaccgcgatcgaccttcagcgcggcgttggcgccggtgtaatcggcgggcgccaacgtgtccgccgggttgagcgccggatcggttttccagttgcgcgtcttgccgctggccggcgtgtctttggtgatgtgataggccacccagttggcgaacttggtggtgctgttgttgttcaacgtataagcatgacgcacgatagacacgttgctgctgccgccggtcgggcagccgaccgcgcagttgtcgatggattcgagcgtgtcggccgacgcctgcgcggcgaacagcagggcggccaaggccaacatcttgttgttaaagcgcatattcatatcctcaataagttaaaaaaaatactgtatatatttacagtaaattaaacttatcgcagtgaaacgaatacaacaatgcaacatattcatgttgtgaatgtgtcagtcatggtacagccaggccacacgttaaatacggcggaaataaaaacggcgtccaacagacgccgtttcaaagggggttattccagcaggtcgttgaccgtgcggcgaacgtagtgcgtcatctgcgccagatcgcccggtgacaccgggccgccgccggcgcgcaccacttgctgttcgatctgggcgatttcctgttcgaccttgttggcgatctgcactttgactatcttgtccaccgaagacagcagcaccttcaagacgacttttagcgcgatgttttcgcagaacgagtcgtagtgatgaaccggcggcggcggggccggagccggctcgggcgcgcgcggagccagagccttgaagctgtctacattttcaataataagatccatgtctcttattagttcatcaaaatctttagacactgacttattcccttcgctgtgcgcaaaaaacagaacgcccgtcctcgggctgaaagcggatgagcgacgggcagaacgaattcgggcctggccttcagacgttgaatggccgggggaggggcattctaaccttgcggcgggtcggcaacaagatggggccgtgcgaatgcgcggccctttggatcacgaggctggagggcgcttaacttttcagcttggcggtgattttggccacgtgttcgccctgataacgggcaatggtcagctcttcgttgctcggctgccgcgaaccgtcggcgccggcgatggtggtggcgccatacggggtgccgccgcgcacctgtgaaacgtcaaacagctcctgcgtcgcatagccgatcggcacgatgatgaaaccgtggtgtgccagcgtggtccaggtcgaactgatggtctgttcctggccaccgccggtgccggtggaggagaagacgctgcctaccttgccgtacagcgcgccggaagcccacaggccgccggtctgatcgaggaaggtgcgcatttgcccggccatattgccgaagcgggtcggcgtgccgaaaataatgccgtcatagtccgccagctcttgcggggtggcgaccggcgcctgctggtgttgcttgcccccggccttggcgaaggcttccggcgtcatggtttccggcacgcgtttgaccgtcacgtctacgttatcgacccgattcgccccttcggccaccgcctgcgccaggcgttcgatgtggccgtacattgagtaataaagcaccaacagtttcgtcatgttccgtactcccgctcagatgattaacaaaaacccctgataagcatagaagcgaatgacgaacttggcgttacgacgttacctgatgccggcgatcgccagcagggcgccaaaggcgatcagcagcccgccaaaggtacgatcgatgccgcggcgcaaacgcaaaaagcgcgcattgacgcccggtgcggaaaatagcagcgcgacggcggcaaaccagaagatatggacggcggcgataaaaagaccatagccgatttgcacgccgagcggggtgtgcggagaaaccacctgcatgaataggctgacgatgaagatggtggttttcgggtttaacgcgttggtgagaaagccggttttcaaggcggcgaaatcgctgatggcggccggcgctgttgtgggggctgcatcatggtgcgccgcgttgcgcagcagcgtaacgccgaggtagatcaggtaggtggcgccgatggctttaagcaggttaaacaaccagggcgactgttgaatcaatacgccgacgccaatcagcgtatagctgacatggaccagcaccccggcgccaatgccgcaggcggtcaagacgccggcgcggcgcgaaagcaacaggctattgcgcgagaccatggcaaagtccggccccgggcttatcacggcgagtaaagtaatggtgacgacagcgatgagttcagtcatagttatccttgcgatttttatcaatagagtgactgatttataagagtaatttttctcggtgacaaacgatgaatagtgacagtatcggtgagaaaaactcacgcaaaaccggcaggccgttgccgttgggcgggctgcgttgcttcgaggccgccgcgcggctggaaagttttacgcaggcggcgcaggggctgaatttgacgcacggcgccgtcagccgggcggtgcgggcgctggaagaggaactgggcgtggcattgtttgagcgccgccatcggcgggttctgctcacggcggcggggcgcaagctgtttcaggcgacgcagcaggccttcggcattctggatcataccgcgctggaactgcgccagcaggcgctcgacgcgccgctggtcttgtcctgtgaaccgaccttgttgatgcgttggctgatcccgcgcctgccggcttttcagcaggcgcacccggatatcaacttacagctggtggccggtggcgggccgttttcgttccatgacggcattacggcggcgatcaggcgcaatgacttcgattggggaaagcaggtgcatagcctggcgctgttcagtgaaaaggttgggccggtgtgccaacccgaggcgttggcaaggatgacgatcgccgagggcagcctgcggagtttgcggcccggcactaaactgctgcattccgccacccggccggatgcctggcggcactgggcgcagcagcaggggatgacgttggcaggacattcggagcagcgctttgatcatttctatttcagcctgcaggcggcggtcgccggtcttggcatcgcgatcggcccgtggttgcaagtgcgagacgatctggccgccggtttgttgagtgcgccgttcggttttacgcccgacggcagcggctattacctgctgtcgccgcaggcgatcgtgccgggcagcgcgttggcccggctggccgagtggctaacgctcacggcagacgcctgagtttttgcgccagccgctgttcctgccagcggctgaagacgttgcgcagcagcagagtgcgcaccgcccgcatgaccagcgcgaggctcatgccgccgatcgcccacagcgaccagagatagtgcgggtgggtaaaccaattaatggcgaacaacatcacgccaatcacggcgaaacgcaccgccatgctcagcagtttgccttctgccgcgacctggctacgaaggcgctgttcgtcaggctcctcctcctccattgtctgttgcggctgtgcgttgagatcgcggacctgcacgcccagcgcggcggcgattgcggtcaaggtttccaggctggcctgttcgccgttttcaatccgctgtacggtgcgggtgctgacgccggcgatggtcgccaactgctcctgcgaccagcctttttccagacgtaacggcctgatgcggtacttttgcatgatgcactcccgagttcgctgtcactgtcatccagtgtaggaggcgcggggtggcggcgccacgacagcggcacgacagcggcacgacatccgccgccggcgcgggctggcgggcagtcagaaggcgacgttgcgaataaagcgcagcgggagatcgccgtggttggcgtaagcgtaacgttgatcgctgttgaaagtttgcgcggcgccggcggaaagggtcagcgtgccttgttccagttccagcgtcagggtgccggcaatcacatagatcatctcgctccagccttcggcgtccggcgccgagtcatagcgctcgcccggcatcagcgtccattcccacagctcggcccgttggcgcgccggcacgctggcggcgaacagcgcctggctgcccggctgtgcgccttgccaggccagttcccctaccagatggctgccgcgcgcttccggcgcctggatcagatcggtaaaggaaatcgccagggcggcggcaatcttgtcgagcaccgccaggctgacgttgcgatcgccggcctcgatgcccgccagcatgcggcggctgacgccggaaagttcggccagcgccatctggctcaggcccgcctgttggcggtagccgcgcagattgctgctcaggtactgcagcactttggggggatcggttttcgcgttatgcgccgtattgctcatcgccggactttatctcatactggcaggatctgtgcattatattgcactcagcaggaagggcaagccggtgtcagcagcaaaaaaatcctttatttccgccgtggttccgcagatcaggctgccggaagcggtgttgattttcatcaccatgatctggggcggcacctttttggcggtgcaccacgcgatgcaagtcagcgggccgttcttttttgtcggcctgcgtttcgccaccgccacgctggcgttgacgttgttttcgctgcgcgtgctgcgcggcctgaccctgtatgaactgaaggcgggcgtgctgatcgggctggcgatcatgttcggctatagcatgcaaaccgtcggcctgcagaccatcaccagcagccagtcggcgttcatcaccgccatgtatgtgccgatcgtgccgctgttgcaatggctggtgctggggcggttccccggcatcatgtcgtggatcggtattctgctggcctttaccggcctgatgctgctggcggcgccgagcagcaccgacatgacgctgagcctcggcgaaattctgacgctggccggcacgctgggcatggcggcagagatcatcctcatcggcgctttcgccggcaaggtgaatatccgccgggtgaccatcgtgcagctggcgaccgcctcgctggcctcgtttttgatgatggcgccgaccggcgagtcgccgccgccgtattcggattacctgctgtacagcgccatagggctggggctggccagcgcgttgattcagctgaccatgaactgggcgcagcgcagcgtttcacccacgcgcgctacggtgatctacgccggtgaaccggtctgggcgggcatcgtcgggcggctcgccggtgagcgtttaccgggcgtggcgctattggggggcgcgttgatcgtgattggggtggtggtcagcgagctgcgcgtgcgacgcaaggataaagcggcggtggcgacggaggcggattagcgcagaggcgtaaaaagaaaggggcggagagatccgcccctttttgcatcacgcgattttcttcttgcgcaggaacacgtaagacaggccgagcacgatgaaccacagcggagtgacgatcagcgcctgacgggtgtcttcgcgcagcgacagcagcaccagcacgaacacgaagaacgccatgcacacccagcacatcagtttgccggcaggcattttgtagatcgatttctggtgcagcgccgggcgctgtttacggtagaccaggtacgaacacaggatgatggtccagacgaacatgaacagaattgccgacacggtagtcaccagggtgaagaccgtcatcacgttcgggatcaggtaaatcagcaccacgccgcccagcaggcagatacaggagaaggtgaggccgttggccggcaccgcgcgcttggacaggttggcgaacgatttcggcgcgtcgccttcctgcgccagcccgaacagcatgcggctggtggagaacacgccgctgttggcggaggaggcggcggaggtcagcaccacgaagttgattacgctggccgcggccggcaggccgatcagcacgaacagttcaacgaacgggctcttgtcaggcaccacggagttccatggcgttaccgacatgatgacgatcagggcgaacacgtagaacatgatgatgcggatcggaatcgagttgatggcgcgcggcaacgacttctccggatccttggtttccgcggcggtggtgcccaccagttcaatgccgacgaaggcgaataccgcgatctggaagccggcgaagaagccgctgatgcctttcgggaacatgccgccgtcattccacagatgggtgaatgaggccacggtgccggtcggcgactggaactgcatggcgatcatcaccagcccggcgacaatcagcccgacgatggcgacgattttaatcatcgcaaaccaaaactccatttcgccgaacatcttcaccgtcgccagattaaggccgagcagcaacagcacgcacagcagtgaagcgatccactgggagagtcccgggaaccagaactgggcgtaggcggtgatcgccacgacgtcggcaatgccggtgaccacccagcagaaccagtaggtccaaccggtgaagaaaccggcccacgggccgagcagatccgcggcgaaatcgctgaacgatttgtactccaggttggacagcagcagctcgcccatggcgcgcatcacgaagaacagcataaagccgatgatcatgtacacgaagatgatcgaggggccggccaggctgatggttttaccggaacccataaacaggccggtgccgatggcgccgccgatggcgatcagttgaatatgtcggttagtgaggtttcgccgtagatgatcttctgaagcgggcgtcgcgtcagtcgctattttagagtgatctaccatctgatgatgtcctgttttacctgtcattagtgaagtcgcgagctctgaagtggctcttttttatacatttatccggttgatccggctttagtaaggtagtgcaataacgccacctttgtgcaacatgtttacaacatttatacgcgggataaaagtcgatcaatctttacacgagaggaggcaaatcggacgttcagggagcggaagattactcttcaaacggtgggattaacagaccttatgcggcttatctcgttgattaaacaaagggttgtaaaattcgcatgagaaaaagtaatgggtgtaagcgtttgacagcgcctccgacgaggaggacaatttaccgcgttgggtcgttagctcagtcggtagagcagttgactcttaatcaattggtcacaggttcgaaccctgtacgacccaccaaccaaatcagcgtgttacgcttagacttttcttcgtttcttcccgcattgcgccgttttaagcgcgcattctgcaaaaaaattcgcatttttcgactgatgttcagaaaggtgatctggcgcaaactgcaatgttgcaccgtactttatacggcaagggaggctgtgcgctggcgcaacgtcggcgtaggggcgggccatttgcccaagaatctttcaggtcaggaaacggggaataaatgcgccgtcgacatcaaaagcagcgcccagacggcggccgagagcgcggcggtggcatagacgcgccgcgccggcagttgcaacatgccggccatcagcggcacggtgtaacgcatcaccgccagaaaacgcgaggcgaacagcagcggcagcccgcgcttttgcaaggaacgttgcgctttgcgcagcggggcgtggaagcgtgccggcagccggcggccaagatcgcgacggcacagcagcgcgccgaagtggaaagacaggatcgagcccaacgcggcgccgagggcgatggccgcccaaactgcgccgaagggcagcgcgtgcttgcccgccacgatgcccatcagcagcgtcaccgaggcgggcggcagggcggaagacaccacgatcacggattttcccagcgcgaacaggaaaatcagcagcagcaacatctccggttccggactgtatttggcgataatgtgcgtcaattcatccatttaacacctgcgggcgagagggctgagtgccagtgtcccatccgcaggttcaataagggttaaataacgcgccgctatccggcgatctccgcgtcttgcttgctcacgtcggtgcgccggtttctgagcgcccacaacagcgtggcgcacagcagtgaaaaggcggccagcaccaacggcccggcatgcgggctgtgaaaacgctgttccgcctcggtgcggatcagcggggctaaaaagctgaatgcggcgccaagcgtggtgcaaaaaccgatgccggccgccagcgccgggccggtcagcacctgggcgggaaacgtccagaaaatcggctgtaccgccagaaaactcactgcgcaacagctcagggcgacgatggcgagcaaagggccggcataggaagacaccaccaaacccagcgctgccgcgaccatgcagccgacggcgatcggtaatcgtctggcggtttttctgtcggcatagcgcggcaggaaatagacgcccagcgcggagaacgcccagggaatggcggccaccagcgaggccttgaagccaagatgggtgcccatcagcgaggcgacctgcgacggcaggaaaaacatcaggccgtatacgccgatctgcagggtgccgtagatcaacgccagatgccaaactttgccgctgctcatcgccgctttgacgctgctggtttcggtctgctgctgttcatcggccaattgtgccaccagcgccgtgcgttcttcctcgctcagaaagcgcgcctgccgtggattatcgtcgagatagaaaaaggcgaaaacgccgaggacgacggccggcaatccttccagcacaaacatccagaaccagccgggtttacccaacacgccgtgcatctccagcaatgcccccgatagcggtgaaccgagcgtcagcgccgccggcacgccgagcacgaaaatgccaatcaccgaggcgcgcaccttattgggaaaatagatcgacgccagcagcaggatgccggggtaaaagccggcttcggcgatccccagcagaaaccgcaggacgataaattgctgttcattggtcaccagcccggtgcaggccgacagcgccccccacagcgcggtggtggcgctgagccagcgtttggcgccccagcggttcatcagcaggttggccgggatgccgaacagcgcataggcggcaaaaaatatcccggcgcccagggcaaaggcggattgcgacagcgcgatatcgatggccattgcgtccttggcaaagccgacgttaaccctgtcgataaaggcgatgaagtacatggcgaacatcaagggcaccagtctgcgccaggttttgcgaatggcggcgttgagcgcaggagcggcataggtggcgtgattcactggcggtaacctctcttctgagaatgacaagcgtcggtcataaggaccgtcctggcgccgttgccctcaacacgacggtaacagcggacctttttcgcaaaccctaaaggtctaatggtcaggccttttggggtgaaaaaaatgccgcgtatcgggtcggcagattgatgcagacatcaccatggtgaatggtatgttgcttttttgttaatcagacgttcacacagggccagggcgcgttcaagcgctttgatcgagatctgtgtgcgctatcaccgaattggcaacccggtgttagagctggagagtggcgctttcatctcgcgagggaggacgataaggtgaggcacggcaaaacagaatgcaggagcgcaacatgctgaaggtcatcgctgaagattttatccacccggaacacattgacaccgttatgccgtggtatcgcgagctggtggagaaaacccgtcaagagccgctgtgcatcagctatgaactgtgcatcgaccagcaggatcccgggcattttatttttatcgaaagctggccggatcgcgctgccctggatgtgcattgtcagaccgagcatttcacccggctggtgccgcagatcaaccactatcagcgcaagccttgtaccttcctgtttatgcaggcatttcctgaaacaggcgataaataggcgaaaaaatccccgcagggggcggggtcaatggcttctcattactatcttgttgtgtttaaaaaataggctgataatgattttcattctctaagaatgctcttaaataaatcagcttggtgaatgattcactgcctgcttttcgctggcggttttaatggcgcgcaacatacggcgccgtatcaacccgcttaccaggcgaatcgcataccaatagggggtaaaccgccgccggctggcgtcgtcggggcagaagatgcgcgtttccgtcaccagacgacagcgcccaccctcggaggggctcacgacataacccagcgccagtttggcgacgccgggctgcgcgaaagccagaaaccccgccccgtcggcgacctgctccaggccgtattcagcctgccaaaatcggccgatcaggccatagaccaacgcgctttcatcctgctcaagcaggcaaaagttatgcaggccaaacggcggcgggctgggtttatcgcgtggcatcaggcgcacgggcaattcgcgtagtgctatcatgctgcggaaaaagcgatcgtgcttgggatcataagcggccacggcctccaggatccgcgcctgcggtgcggtgatggcgatcgcatgccgctccgagaactggtattgcccaaggtatttattcaatagcgtcatgctttgcattctcccgccattcgttttgcagcagggcgaaaccgaattcgtcgccccacgcgcctttgaaaaacacgttttgccgccaacaggcctcacggcgaaagcccagcttactgaacaacgcggcggcgcgaagattacgcgcgtccaccacggcggtaatgcggtgtttcgccagcggcccgaacagcagggcgatgacggcgcttagcgcctcgcgcgcttgtccttgccgctgatgaaccggatcgaaggtcacgcccagttcagcctgacgcccttcatcgaaaaaatggaccgcgacatcgcccagcaacgcgccgtcttcgcggcgctcgaccgccagttgaaaccagctgtcgtcacggttgaattcgagctgccgttgctgtgcgaaaaaggcctgtgcctcggcggcgctgtagtcgctccagctttgatagcgcgccacgtctgggtggctgcggtaggcggtaaagtggggcagatcgtcggcggtgaacgggcgcaggatcagtctgggggtttgtagaggcaaatggcgcattgtttttccttatcagcgcattagggctaccggcagtgtagcccagcgccgacaggcaggctgtgtaaaatgagcggtggaggacaaacgggaaatgccggttcaggcgaaccggcaggggcattatcgacgggcggcagcctgacgcaagcgctcgaccgggccttgttgaaaatcgaatgagggggcttcttgccgcgccagcccctgacgcacgatggccttaaccgcctggctggcggcaagatcttttccggcgatctgttcggcgatgcgcaacgcttcttcccgggccgaacttgcgctgatgcgggaaatggcgccgtgtgacaacgcttcctgtgcgccgacggttctgccggtcagcagccagtcgagcgcgacatagggggaaatacgcgccggcaatcgcgcgcacccgccttgtgcggcgactaacccgagcccggtttcggggaagctgaagcgtgcgttctggccggcgacgatcagatcgcacgccagggccagctcaaatccgcccccgtacgcgatgccgtcaacggcggcgatgatcaccttggcgatctgtgcatggatcagcccgccaaacccctccggcgtgacgatgggcagttcaccctgatgaaaggcgttgatatccatgccggcggaaaataccgccggttgaccggccaggacgatcgctcgcaccgagtcatcgttatctgcctgccgcaggtaggtgcggatcagctcggccatctgcaggttgatggcgttctttttttccggccgattgagggtgatgaccgcaacctgcgcgccataacgttcgtaaagcaccggcggtgattcactcatcgctggcctccccgcggaaaaagatcagcgtcagcaatagggcgatggcgccgagcggcagcgaaaacagcggcaggtaataggccggcagcgcatagagcgccaggccgcccagcatgccgcctgccgcgatgccggcgtacagcaccgagctgttgagcgatacggtcagcgcgccaaagcgtttcgatagcgacaacaggtgatgctggatcggcaccagatacatccagccggtgataccccagaccagaaagatggccagcacccaccagggggaagtgacatagaaggccagcagaaacagggacagcgtctggatcgccacggaaaacagcagcacgaacttgctgccgagggcatcggttaacgcgccggaggcaaaattgccgatcaccgcgccaatgccgaataccagcagcgcgaggggcaggatcgcctgcgggccgaactgggtgtttttcagcaacacgctgacgtagctatagacgatgtgttccgagcaaacggcaaaaaaggtgatcagtagcgtggtcagcaccgccttttgccgcagcggggcgagccgctctttcagcgaatgcttgcccggcggcgcaatggcccgcagcgccagcgacaggcccagcagcgcaattgcccccagcagggcgatgaacaggaagatttctcgccagccgatcagtttggcgagaaaggtgccgaacggaataccgagcgcaatagccaacgtcatacccccatagacgatggaaatggccaggccgcggcgtttttccgccaccagccctaccgcagcggcggcggcctgcggcgtgtaacaggccgcccccaatgccgccagcactctgccgaacgagatctgcaggtagctggtggcccaggcgcaggccaggttgccggcgatgaacagcaccagcgccaactgcaggatatgcttgcggttgacgttgcccagcagccaggcggtgagaggggcgaacagcatataagccagcgcgaataccgatatcaactgccccgcttgcgcggggctgacggcaaaggtatcggaaatgtcgctgagcacgccggcgacgataaaggcgtcggtgccgatggcgaacgtgccggtcgccatcagacagagcgtgatcagatggccgttataatccgctaacttcatcccgccctccgcagatcgttcgccgcccagactcgtcccagcgccgccaggaaggtctccacgtcggcatgggagtgcgccgaggtcggcgtcacccgcagccgctcgctgcctgcgggcaccgtcggtgcattgaccggttgcacgtaaatatcgtgttcatcgagcagcactttactgatgtgtttgttgcggtgcggatcgccgaccagcagcggcaggatatggctgtccgccgacaccagagggatgccggcggcgcgcaggccggttttcaggtgatcgacgatcgccaacaggtgtttgcgttgggtgtcatgctcgaggttgtatttaaaactggccagcgcggcggccaccaccggcgccggcgacgaggtgctgaagacgaatgccggggcccaactgcgcaccgcctccaccaccgaacggggcgcggcgatatagccgcccgccgcaccgtaagatttgccgaacccgccctgaataatggtgattttatccagcaggcccagttgttcggcgtagcccagcccacgttcgccatagacgccggcggagtggatctcgtcgagataggtcagcgcctggtactgctccgccagcgccacgatctgcgccaggggggcgaagtcaccgtccatggaatacagcgactcgaaagcgatcagctttggccgcgccggatcggcggcctgcagcagctcggcgaggtgtgccacatcgttgtggcggaagatttttttctccgctttgctgtagcggataccgtaaatcatcgaggcgtgattcagctcgtcggagaacacgatcagatcgggaatggcgtcgcacagggtggataaggtggcgtcgttggcgccgaaaccggtggtgaacagcagcgccgactctttgccataggcgctggccagcagcgtttccagctcgctgtggtagaccgaggtgccggaaatgctgcgggcgccgcaggtgcccagcccgacccgattaaccgcatcggtggtggccagcagcactttggggtggtggctcatcgccagatagtcgttcgagcaccagacgttgagacggcgctcaccgtgatggccgtggctggtggcccagggtttgtcctgcacgccgcgttcaaggttgaggaactcgcgaaaacgcccctgttttttggtttccgccagcttttcttcaagaatgttcagtacgctcatcgtatgttccttgtgttaaacggctttaaggtttaatgacagcccctgaccgacgccgacgcacatcgtcaccaatgcgttgttcgcctgttggtcgcgtaattccagcgctgccgacagcaccaggcgcgcgccggacatccccagcggatgaccgagcgcgatggcgccgccgttcgggttgacccgcgcgtcgttggcgccgatacgccagtgtttcagcgccgccagaacctgtgaggcgaacgcttcgttaatctcgatgatgtcgaagtcgttcaaggtgaagccgccgcgctgcagcaagcgctcggtggaggcgatcggccccagccccatcagcgccggttcaacgccggcggccgcgctgtcgccgatctccgccagcggttgccacccctggcgcttcacgtagcgaccggaagccaatagcagcgcggcggcgccgtcgttgatgccggaagcgttgcctgccgtgaccgaaccgccggcggagaacgacggtttcagcgcctgtagctgttgcagcgtgctgagccggggaaattcatcctgcgcgaatgtgcgggtcgttttacgatcggccggcacgtccacgggcgtgatttcccgcgccagccggccgctgtcgatcgcccggcgggccttctgctgcgaggccagcgcgaacaggtcctgttcctcgcgtgagatatgttgccgttgggctacgttttccgccgtaatgcccagcggatcgctgccgtagcgctccgccagccgtgggttaacaaagcgccaccccagcgtggtgtcgtacagcttcacgcctttgtcgaacggcgtttcgcctttgctcagcacatagggcgcgcggctcatgctttccacaccgccggccagaatcagttcgctgaggccgctgcggattttcgccgcggcgtagatcaccgcatccaacccggaggcgcaaaggcggttgagggtgatggcaggcaccgacggatccaacccggaaagcagcgccgccatgcgggcgacgttgcggttgtcttcgccggactggttggcgcagcccaggaccacttcgtccagatctgcttccgccgccggatggcgctgcagcaggccgcgaatgatcgtcgccgccatgtcgtcggggcgggtatgcgccaggctgccgccataggcgccgatcgccgtgcgcgtgccgtcgatcagataaacgccgtcatctttaatgctcatcatggatccttaaggcgtggtcgtcagcgccggttgcgcggcgtgcagaagggtgtaatgcggcgcatagcgcgccgcgtgcagcagctgcgccagattgctcagcgtcgtcctgacgtttttctcccccagtttgccgagccagtcgaaaatgccgccggcgtagttaacgcccgcgacggcggcgacatcgatgtcttcccggctgcagacgccgctttccaccatgatcaccgactcattgatcaggctgctgaggacgcgggcgacgataagcgccggggagtccttgataaattcaacctgcgggattgccgtgtgcagcaggcgtaaaaacagcgccttattggccgcagaagcgtggcggctgtgcgccgccaccagatacgtggtgtcggcgtagttcagggcgacatcgatcacaaaggcatccgctgccgtctgctcggccagttggctcgccgtgcggccatcggtgatgctgacggtgaaagcgtcattgatctggacggccgctcccagccccggtaatgccggccgttgttccacgcgcagctgtggccactgaagcgcggctcgctgctgcaacagggtaaaaaaaggatgctcgccgtaaacgcgcagcgtctcgacgtctgcattgttggcggccgtcaccggcggggcggtttcttcggcggcaaaataggagcggccgttctttttccccaacagaccggcatcgaccagtgaacgctgcagatgaccaggggtatagcgcgggtcgtattgcatgtcctgccagatttgccggctgacctgatagttaatgtcttggccgataaaatcggtcagctcgagcggccccatgcggaagcgcccgccggccttgagggcgcggtcgatctgcgccgcgcgcgccacatgttcttccaacaggcggaacccttccaggtagtaggggcgggccatgcgattgacgatgaaccccggcgtggcctggcagacgacatcgcgtttccccaacgccgccaccagttggcggcagcgttccgtggtggcgtgtgcggtaaagtaggccggaatgatttcaatcagcttcatcagcggcgcggggttgaaaaaatgcaaaccgataaagcgctcgctgtgcgtcaccgcagttgccagcttgttaagcgacagtgaggaggtattggtggcgatcagcgtgtcgggcttgaccactgcggcgatggccgccagcacctcaagtttggtttgttcttgctcggcgatggtttctatcaccagctcgctgtcggcgatggcctcaaacacggaagtgaacatcagattggccagcaccgcgtctttatcctgcagcgcgatcttgccctgttcgactttcttgttcaggtcttgcgcgatatattcgcgagcttgattgagggtattgccgttgcgattataaagcatcgtgggaatgcctttttgcgcgaaaagataagcgatgcctctgcccatcgttcccgcgccgataatcgcagccgattgaattgccgcattactttctgccatagaaaatccccgtcactgtatgccatgcgaaattcgcaaatgcttattatctctttggatttacggcggcactgggtgcctgtctggaaagtaattggtggtgtcctggctgtctaacggtagaaatgacaggtttacgtgtcgaggagagtatgctattcgcgtagttttcctgttcggcgcaataaaaaggcttattttaaggggaatagctgttttcgttatagcgttggtattttttattatatgaaacggctactggcgccgggcggcgatattctatagtgaatctgacctatcgataaatcggcatcgctatctggagaatctgcgttatggatacccgcactcaacggctcatggcggaggtgattggcagcctggccgatcgcgaatgctttctgacgcagctggggccctgcgccgaggcgttggggtttgattatttctcctacatcgtgttttcctgttatccggccagcagccccaagatgctgatcgaagggaatatttcaacgaactatctcgaggattatcggcggcagcgggtatatttgcaggatccggttattgagcgtgctcaccattccacgctgcagtttcagtgggacgaaagcttttatcatgagcggccgacgctttggcggcgtatggcgcaattcggcttgtgcgccggttggtcgcagtcggtcaaggattgctatggcaggttggggatcctgacgtttgccggtaaagcgctacctgagcaaacgccgcaagcgcgtgcggcaaatgaaacttttttcctttggctggcgcaaaccgcccataaaacgctgcgggaggccttgatatcggtgaatgatgacgcgataaaagatgtgttgacgctgcgcgaaaaagacattttacgctggagcagcgaagggaaaacggcggaagagatcgcgttgttgatgggggtgagcgagcgcacgatcaatttccacatcggcaactcgattaaaaagctttctgtcgccaataagaccgccgctaccgccaaagcggtttatttacagctaatttaatctcgagtaataaataattaatcgcctatccgttatcggtgtaatgtttatattttgttaaattaaaaactatccttgtcagtatttaccactcgatcacaaaagcgtgataaagcgattcaccgcgcccgtgcgcggcagtattctgttggcacccggtttacatagaaaggacgtgatatgtacaagactattttagtgccgatcgatattgaagaggatctgttgaccgagcatgcgctgaagcatgtggaatatttggcgaagatgtccggcgctaaagtgcatttcttccatgcgctgccggatgcctcggcttttgttactgcctattcgttcggcctcaaggagtttgagaatcaggcggaggtgaaggcggtggatagactgaagaaaatcatgtcggaaatcgatctgccgttggatcgcctcaattacaccgtcagcttcggttctgcacgcgatcaggtgttggaactggcggaagagatcgacgccgatctgatcatcatcggttcgcgtcgcccgagcgtgaaaacctatctgctggggtccaatgccgccgctatcgttcgccatgccaatatttcggtgatggtggtcagataattcatcttaaactcaccgttttcgggcacgttctgcggttaccggccggctgcagagcgtgctttgcgttttattgccatcccagtctgaactgctacgattttagctgacgtttttatgccaaccgggccaccggccttgcgcatatttttcatttcagccagaagaggggcagctatgccattagaagtcgatgggattatcagaggcgatcggggcagtgaaccgagccgttggcaacatgcgtcaaccaaaccgcttatcacgctaacctggcaccacaccattccctggaactgtttgcgtaatgtctggaatggtttggtggcggggcagcattggaacgcgctggacgagtttatgaatctgatcggtgtgccaaaccgcgccgcggtgctcaaacagatccagaataaaaacctgcaggatcgcgatggattacacactctggtgacctggcaaggatggaatatcgtcgaggggccaggtaatgagtatcgcgcgcagggggacgatcccggtgaaaacttcgacggttggtcgggtaaggggatgagcactaatcagcaagcgacgctgcagcaggtcaacgtgttgtatcaggtgatggcgccgctgggaagccgtgcgctggacgccgccagacaggcgccgcccattactgcggaagaagcagacgtcttgcaacggacgattaaacagacccgcccaacgttgcgaggaaaggaaccgatccggtggcaagaagacatgtggcatcaggtgcagccgggtaaagaggcgaaacactttgcacgctgggacaccaaaccggtatggcgcaagcgcctgcacagcgacatggctcaggctggataagcctctccccgcgccgggttgccggcgcggggcataaatccagcgttaatcgcacagcgccactatttcgtcgtacaacgccttggggatttccacgccgtattgctcgctctggcgccgttgccgataacggcgttcgccggggatgcgggcgccttgcgcctgcatatcggcaaacatcgcctccgctccggcgaaatatttcgccttatccgcaccgagaaaacgctcgggatccaacgcgatgaccagctcaccaccgtaaggcgacgaaccggtgccatcgtcataggccagcgattccttgctggtcatatcgccgatcagcggccctgccagcaattcaaccattgccgccagcgccgagcccttatgcccgccgaaggtcagcatcgcgccctccaacacgctggcggcatcggtggacgggttgcctgccttatcaatgccccagccttcaggcagcggggtgccggcgcggcggtgtaattcgatttcgccgcgcgctgccgcgctggtggccatgtcgaacaaaaacggcggccgatccggacgcggccagccgaaggcgatggggttggtgccgaagagcggtcgcgaaccgccggccggcgtcacccaggcgtggctgggcgtgcaggccaaggccaccaacccctgctcggtcagcggttcgatatcggcccacagcgcggagaaatgcacgcagcggttgatcgccagcgcggcgacaccgttggtgcgcactttctcgataaaggccggcagagcggtgcggtaggccagcagggaaaacgcaccgccggcgtcggcgcgcaagatggccggcgcctggtcgagcaatctgggcatcgcatcggcagaaaccttgcctgcccgcagcgatcgcacgcagcccaacagccggtacagcccgtgagaagcgcagccgtcgcgttcgccctgggtgacattttgcgccaccgcctcggcatgcgcctgattgaaactgttgctgcgcagcgtacgcaacgccagttgataagcctgttccagcgacagcacatgcatggatgtcatttcgatgtcctccctgggttcattcttcttcatcgccgataaaattggcctggggtaaacaggtataggcgccccagtagtaaatcgccagcgcaatcaccgccatggtgagggtgtcccatggatgagcaatagcgccgatgccgccgaagctgctgaggtaggaaagcccgatcaccagcgcatagaagacgatcagccacagcgaggaccaaatttgctgcctgaggctaacggcgtgggtcggcacctgattcttgaacaggatgtagatgaagaacatcaggatctgcaagccgagcagccaggagacggtgtcccagccggaccagaagacgatcagcgccgaaatgataaacgacagcgggccgagcacgcagaaaccgcggacccggaacggacgcggcatatcgggcgcattgcgccgcagcccggcggcggtgaccggggcgatggcgtagctcagcaccagtgcggcggacaccacgccgatcagtttttcccaggatgggaacggcagcgtccagaataccgagagagcgaaggtcagccacagcgccgggcgaggaatacctgactcgccatccacccgggtgaacagtttgaagaaggtgccggcgcgcgcccaaccgtagatcacgcggggcgtggcgttcatatagatattgccggtgccgctcggcgaaacgatcgcgtcgctgaccaccagaaacgccagccatcccatgcccagcgtgatggcgatgtcgcggaacggcagggagaactgttggctgatgccggcccagccgccgctcagcatctcgctggggatgctgccgagaaacgctatctgcagcagcacatagatgatggtggacagcaccaccgacaggatcagcgcgatgggaatggtgcgctgcggccgttgcacctcgctggcgaccgaaatgatcggcgtcaggccgaggtaggcgaagatgatgccgccggcggaaatggcggcctcaacgccggcggaaccgaagggagcaaagccctggctgtgcaggttttccggtttgaaaaagctgaacaacaccacgatcaccaacagcggcaccagaaacttcagcacgctgatcaggttattggatttggcgaaggttttgacgctgtaatagttgagcgcgaagaaaaagcacagcagcgccagctgcaccagccagccgatcgcggttggatcgccggaacccggctgactgaggaacgggaaccaggcggcggcgtactgccgggcggcgacgacttcgatggcgatcaggctggagaaggcgatcagcgtgataaaccccagcagataacccatcagttcgccgtgcgagaataccggatagcgaatgatgccgccggcgcgcggcagggcggcgcccagctcgcagtaaacgatgccgagcagcagcaccgccaggccgccgatcagccaggaatagatgccggccgggccggcgatggaggagacatggctggcggcgaacagccaaccggagccgaagatggcgcccagaccgatgaacgtcaggtcggtgagcgtaagctgcttcttgaatttgccttgggttgtcatggtattacccttttgttattgagtggcaggcagatgcggccgggctaatgttgggcaggtgaaaccaggggggctcgggtgtaaacgccgttaaccagccgtagcaggttgagcgggttggcgtcctgcagcgccggcggcaacagcgccgcaggggtgttttgcaaacaaaccggccgcaggaaacgctcgatggccagcgtgcctaccgaggtgccgcgtgcgtcgctggtggccgggtaagggccgccgtgcaccatggcgtcgcacacttccaccccggtcggatacccgttgaacagcacccgaccggctttgcgcgccaacagtgtcgtcagcccggcggccacatcgagatcgtcgtcgtccgccagcaacgtggcggtcaactggccttgcaatgccgttagcgccgcatgcagctgcgcttcgttatccaccgccaccaggatgctgaccgggccgaagacctcttgttgcagcagcgggtcagcctgcagcaacagcgcctcttccgcctgataaagctgcgccgccgcccgaagcgtgggcgtttcgcttcggcctgcgagacgccgcatacctggatgggcatcgaggaccgccagcccgtgacggtagtgctccagcgtgccggcattcagcatcggctgcggctcggcggcgttgaccagggcgctcatcgtttcggttaaccgatcgaaggcggcgccgcgcagcgcgacgattacgccgggcttggtgcagaactgaccgcagccgagtgtgaaggaagagaccagttcctgcgcaatgcgctgcccgcgccgcgccaacgccttgggcaggatcactaccggattgatgctcgacatttctgcgaagaccgggataggttgagggcgttgcatcgccagatcgaagagcgcccggccgccctgcagcgagccggtgaatcccactgcctgaatcgccggatgttgtaccaaatcggcccccacgcggttgccgaagatcatgttgaagacgccggcgggcatccttgtgcgttcccgagcgcgctcgatcgcctgagcggtcagctcggcggtaatcatatggccgctgtgcgccttgaacacgaccgggcagccggcggcgagcgcggcggcggtatcaccgcccgcggtggaaaacgccagcgggaagttgctggcgccgaagaccgccaccgggccgagcgccgtgcggtattgacgcagatcggggcgcggcaggggggaacgctgcggcagcgcgcagtcgatgcgcacgccctcgacgtcaccgcgccgcagcagcgtggcgaacagccgcatctggccgctggttctggcgcgttcgccgctcaaccgcgcagacggcaaggccgtttcctgtatggcgaaggtgaagaaaatatcatccaatgcgtctaactcttcggcgatggcgtcgagaaagttcgcgcgttgttctgcactgagctgtgaatagcgcgcaaaggctgcggcggcggcttctgcggcggcggcggtttctgccgccgtggcctggtggaagcggtagccggttggctgactgtcgtcggcgcgcaggctacacagcgacgcttccccttcggcgcggcgttggccgccgataaattgttggccgctgatggcggcgtagcgatcgttgggcatcggttcccccggtagataaagcatgacgcccggcatggccgggcgatgaaggcgtcacaggccgacgttcggcagcgcagggcgggtggccagcgctttatcgatcacggcgttgatctcggtgagcgtttctccctgcagcgccaggcgcggagggcgagtgacagcgctgccgcggccgacccgctgttcgcagagtttgatgcactgcaccagatcggggcgggcatcgaggtgcagcagcggcataaaccagctgtatagcgccaacgcttcctcatagcgtttttccttcgccagccggaacagggtttccccttcgcgcgggaaggcattggacatgccggagatccagccttgtgcgccgacggcgatgctttccagcaccacatcgtccaatccggcgaacagcacgaagcgatcgccgacttcattgcgcaggtcgataaagcggcgggtatcgcccgacgagtctttgaagcacacgatgttctcgcagtcgaccagcgaggtcagaatgtcgggcgtgacgtcatttttgtaaatgggagggttgttgtagaccattatcggcagatcggtcgcgccagcgacgctgcggaagtgcgcggcggtttcgtgcggtttggcggagtagaccagcgccggcatcaccataattccgtcgacgccggccttttgcgcttcacgcgccatgttctgcgcgaaggcggtggtgaactcggcgatgccggcgatcaccggcactttaccgtcggcggcgtctttcgccacctcgatcaccgccagcttttcctgcactgtcatcgaggtattttcaccgacggtgccgcacaccaccaggccggagacgccgtcgcgcaccaggtttttgatcaccgtatgggtggcgtcgagatccagagagaaatcgttgcgaaattgggtcgtcaccgccgggaatacgccgctccagcttagggttttatggctcatcgtgtttgtcctgtcgtccgaaagtgttaatgaaaagtgaatctttggtaaggctcaccgacagattgaccggtattgcgcagggaggcttgacgcttttcgccgattgccgcgacgaaattggcacaatagcggcggaaatcgggcgtgaaaaatcgggcgtaggtacgccgtgagaagagagggttaacggggtaaatcagcgcgttaagcggaaagcgtcaggcgaaaatcgcgcggcgtggagccggtcatcgctttgaactgacggctgaaggcgctgtgatcggtatagccgcactgcagcgcgatgtccgtgatcggcagatcgccggccaggagttccgtggccttttccagccgcactttgtggatcatctggcgcggggtgaggtggaagatacgtttgcagtagcgttcgatctgcgccaccgataacccggtcagcgccgtcagctcttcaagcgcgatcggtctggcgtagtggcggcggatatgcacgtcgatcgccgccagccgctggtaggccgggtgattggctctggcctcctgcagatcgtgagaaatacccgccataccgatgatttttccctgcgcgtcatacagcgccagcttttgcgtcaggcaccagccggtttctcggccgttgtacaggtgcatttccagctgatcctggatcaacacgccgtggcgcaatacccgcagatcctgctcggtatagccggatccgagctgagcgggaaaaacgtcggcggaggttttgcccagcagcggcgtcacggttttgaaaccgcagcgcctggccagcgtcaggttagccagcaggtagcgagcctgggcgtctttgataaagaacaccacgttggggatcgcgttcagcaacggcgcgatcagcgccagcgtattcagcagatcgcgcaggttgttcgggcgctgctgcgccagcccgtcgcacaggcgcgacaaatgttcgacggcgaaaacgtcctcctgatccggcagccccaccagggctggcggcgagagagaaatctgatgttgatggtctgaaatggatcgcatagcagtcccttttcggtcgttagccggaaaaacaggcgagccagattggcgctttcgcatcaatattaacttttttgtaacgaagcaagcgctatttccggcgggctgccaaatatgcggattgccgcatacttttgccggacggtgtttggcggttgcttgaaaactgaggcgtttctcgctacacaagggtttagcatgaaaataacgacatgataaataagtcattattatgacaaccgttaaactcatacccgcgacgcgtcaggcctgacgtttgtcactgtgctgatttcttcattcgctgcgccgaaatgcatcaagccgtcatgctcacattcgttcaggctaatgccattggtaacatctcattaacccaggagacgccgatggcactttctgcgcatatcaccgctttgcgggcgatcgattctcataccggcggagagccgacccgcctgatcgtggaaggttttcccgatctcggcgagggtagcatggcggaacggcgggcgcgtttcgcacaacattatgacgattggcgctgcgcggtgatgctcgaaccgcgtggcaatgacgtgctggtgggggcattgctgtgccgcccctgctcgccacaggccaccgccggggtgatcttctttaacaacagcggctatctgggcatgtgcgggcacggcactatcgggctgatcgcttcgctggctcatctggggcgcatccacgccgggcgccacctgatcgagaccccggtcggcccggtaagcgccacgctgcatgatgacggcagcgtcacggtggagaacgtggcggcttatcgctaccgccgccaggtgcggcttgaggttgccggtcacgggccggtgacgggtgacatcgcctgggggggcaactggtttttcctgatcggcgagtcaccgttgcccatcgataaacacaatctggaggccttgaccgcgttcacctgggcggtgcgacaaacgttggaacaggcgggcatccgcggtgaagacggcggagcgatagaccatatcgaactgttcggtgacgatccgcaggccgacagccgcagcttcgtgctgtgccccggcaaagcctatgaccgttctccgtgcggtaccggcaccagcgccaaactggcgtgtctggcggcggacggcaaactgccgccggacacgcagtggcggcaggccagcgtgatcggcagcgaattccaggcctattatcgttggaacggcgatcgcattgccccctttattcgcgggcaggcctatgtgtgcgccgatagccaactgctgctcgacgaacgcgatcccttcgtctgggggatacgctgatgggcgccgagcggggagccgatgtcatcgtggtcggtgccggtatcatcggcgccgcttgcgcctggcggctggcgcgggaagggtatcgtgtctcggtggtggatgatcgccgcgccggcgccaccgccgccggtatggggcatctggtttgcatggacgataatcctgccgagctggcgttgagcgcttattcgctgcggttgtggcgcgaagtgacggggcgcatgccggaaacctgcgcctggcgtggctgcggtacgctgtggttggcggatcaagcggatgaaatggccatcgccgagcaaaagcgggcgcggctggcggagcagggcgtggccgcggaactgctgacggcagagcagatcgccgtcatggagccgatgctgcggcacggcctggccggcggactgcgggtgccgggcgacggcattctgtatgcgccgctcgcggctcgctggctgttggccgaccgtggtgcggcaattgacgtggtgcatggtgaagcgacagcgttggaagaggaagccgtgcggctggcggacggcagacgtctggccgcgccggtggtggtcctggcctgcggccttagggccaatagcctattaccgcagactttgcttcacgccaagaagggccaactggcgatcaccgatcgctacccgccgcgggtgcggcatcaactggtggagctggggtatggcgccagcgcgcatgccagtaacggcacgtcggtggctttcaatgtgcaggcgcggcccaccggacaatggctgatcggctcttcccgccagttcgacgccgtcgattcggcgttggacatgccgctgttggcggcaatgcttacgcgtgcgcagcatttcttgcccgcactggcgcagatgaacatcattcgctgctggaccgggttgcgcgccgcctctgccgacgggctgccgttgttgggtgtgcatccgcggcattcctggctgtggctggctttggggcatgagggattgggcgccacgacagcgctcggcagcgctgcgctgattactgcacagattggccggcaaacgccggagattgacgattccccgtatttggctgcgcgggcgtttgccgccgaggagttgcctgtatgaatgaaagacaaaatacgatcgcgttgagcatcgatggagaacaccggcgggtgccggttggtctcagcgttgctgcggcgctcagcctgtgcggcgacgatcgttgtcggttatctgtttcacaccaaccgcgtgctcccttttgtggcatgggcgtttgtcaggagtgccgggtgaccattaacggcctgcgtcgcctggcgtgccaaacgctgtgccaagccggcatgcgcatagagaggaacgatgatgagtaacttcagttgtgaggtgctgatcgtcggtgccgggccggccggcatggcggcggcgctggccgctgcggaaagtggtggccaggtgcgaatgattgatgataatccgcatcccggcgggcaaatctggcgcgacgggatgcaggtggctttacctgaaacggcgaaccgctatcggcaggcggtggcggcgcgggaaaatattgcgctgcagtctggctgcaagctggtggcgcagtgtggcgctaaccgattggcatatgaagacgccgagggctgcggcgtgattcgctatcaaaagctgattttatgcaatggcgcgcgtgaattgttgttgccgtttcccggctggacgctgccgggggtgaccggcgccggtggtctacaggcgcaaatcaagcaggggttggcgatccgcggcgagcgagtggtgatcgccggcagtggtccgctgctgttggcggtggccgacagcgtgaaacaggccggtggagaggtggtcatgttggcggagcaggcgccgctttggcggttggcggcgtttgccggcggcctgtggcgctggccggccaagctgcgtcaggcgttttctctgatgccgcatcgttaccgtgccggtagccgggtgcaggcggcgttggggcaagcacgtttaacctcggtgcgtgtcaataacggcgggcgggaaagaacgatcgcctgtgacaggttggcctgcggttttggtctggtggcgaacattgagttggcgatgctgctggggtgtcggatagagcatgacgccgtagcggtgaatcattggcagcaaaccagccaggtgcaaatttttgctgccggggagtgtaccggcatcggcggcagtgaattggcgctcactgaaggcgccattgcaggttatgccgccaccgggcagcgggaaaaggcagagcgcctggcggcgcagcggcggcggtggcggcgtttcgccacggcggcggcaagtgccttcgcactcgatgagcgcttgaattcgctggccaatccgcaaacgttactgtgccgctgcgaagacgttacgttggaacaggtacgccatcagccggattggaacacggctaagatgaacagccgctgtggtatgggggcatgccagggtaaagtctgcgcaacggcggcgaggcagcttttgggctggcctttgccgtcgccgcgtgtgcctttaacgccggtcaggacagaaacgctggttgcgctggggctgaaccgatgtgatgacgatggttgaatgggttagcggcatctcgccccaggcaaacgccgccacattaccattgcggccaatagtaggttttctcccgccagcctttgccgtacatacaggcttcgatggtggcgtctcgggcggactgattgcgatcggtctgcactgttttaatcgacggctccttgtcgtagcggtatcccgatggacagtctttcttattcttctcgcaaggaatgtatttgttttcgtagctgaactccacgtcccgcaccacgtccggggggaagcgatcgtatccgcggctgcggcattcggcatattcggcattccgggtactctcaaccgcgccaggcctttcccattgggtgcaggcggtcaacatcaataacggcaaaacaatcaaacaacggaaattcttcatggtgtccctaactctttctctatcctgaggctcgcagcctaggaatgttcctaactgacgaggtgggaaagtgtaataaactggcggaacaattggaaatgataatggttattgtttaggtgtgattgaggaagtgccgcgttgagagaggatgtggtgcattgagggcagtctgtaaggatccgcgacctcactgcgagggctggacgatgtggcattgattttattcattctctttatgccgcaatgatccgaccgcaattgcatcgttttaatgagggaaataatatgcaggctaagtattttcttatccggtatgactattatttttatttaggatatttacccatgccaaggatttaatgctcagtattaataccttatttttttatttctgtttttttattggggttttattttcaggttttttctggggaaggctttttagttacagggaattcatttgcattttaaatttggattttttaaattcattttagaggaaggataaccgtacgcgacagagtcaaaaaaggagtttattttgtctgggataaagaaaacgcctgaaagtcatgacggtttaccttcaccatcagaggattatgatacttttaagcacctctccgatgttggcgccgtgttgggatatgggcgaacccgcttttatcagtggtgccgtgggcgcggatttctaaccccgatgaacgttccgtcccatgaaatgatcagcctgggatatatggtggcggtattatcagagaccggtcatacccgggtttatgtcacgcaggatggtttcagttacgtcagtggtgcttttgcggcagatatccaacgtggcatgatcaagttttaaatctgcaagaatcgcctttatttcaatggctttaatgcggaatcttcttatccctgcaggtccgtgataggagtgggaagttatccgattttttcgtctctgcggtatgaaggctactggagacagctattctcttgctacgataagcattattttcttcaggagccaaggatgaagcattacgccgcgttgttatttgcctctgcactgctgacggggtgtgcgactcaagccgtaccgccgcaacaggctgagttgccccccccaagccgtctgatgctctatcagaatatcccgaatacgccttacgctacggtggtcgtggtgcgcgacagcggaatgctggcgggcagctgccgcactggcgtctatgtgaatggggagtttgccgcttcactcgaggcaaaagaaaaagcagagtttcgcgtgccgccaggcaatatttcggtcagtatcgggcaagatatgatcgagaactctctatgtatttggcgtgaaaccagcggcagcgtgccgatgacgctgcgcgccggtgaaagccgctatctgcgcatcgccggcgatcggcagcgaggcttcgtgttgcaggcagggcggccgtaacagcccaggcaagggcgttaacgcccttgccaccatccccacagcgtaattaatagccacgccgccgcaatccagcacagtaccgccgcccccagcgctaacgacagccgcaggctgttaatcaggaaatacagcgaaatcaaatataccaggtagggcaataccgcccacatgccgaaaatcagcgtcgttttcagtgccgcaattgaacgttcgctgccgacaatgtaatgcgcaatcagggcgaaagtgggaaagagcgggactaaaccggcgatatagtagttgcgcgttttggccagcaggccgattagaaccacgaccagcgcgccgatcagcgctttgacaaggatgcccataacggtctcgggtgtgggggagaaagtcaacacactgcccgaaagcacgtgcaagatcaatggagtgtggcgcagcgtggtgaaaagcagacccacaagaagtgcgggtctggggcgcaacgcttactgacggtaagcgtgcttgatttgctgaatgctgttcttgaagatttctgcctgagtcggatcttcaatctgcgcgatgaaacgttccatgttgatgatgactttcccggcgtcggcctggccgatcgacttcaagatcagcgtcagcgtagctttgaggcaggcaacctcggtcgccaagatttccgggtttgcagacgtagtgaaatcaacgttgctcattttctctcctgattttttgaggccgtagcctgatacaagctgctttggcgcaccgcgcgcgggctaaaaagtagccccgggcgcggcggcgaatttaactgggcgcggagtatagcatagcatgagtctgtcatctgcaccgggcttgctcaggtctcgcgggtgggcaacgttcgctcattgcctgtctgaatcatctactcttggcaagttatttcgaggtggttaacaagtatttttccggtacgttattgttgaacaatcggggttattataattattgggggcggaggcgccgattttaccggcgtttgccgggaataatagtttcgaccgagggttgccggacccacgttggccgcagattttgttacgcctttaaatatcaaatgattacaaacagccaacagccgtgttaatattattcatgtcgtgattgcttacacagatttctccctcgcggcatgattgtcgcgctatcctgtgtcagacgcagcgcgacgaaattattttcgtcgcccgatcttttccgacgtgacgatttatcggcggcatagacggctaaaattgaaaaatcagctctgctccgcaaagttattcggaagtatgtattaatctgtgttcattcttgtctgaaaaacaagtaatatctctggcgaaaacagaggccgattgcgttactccctttttttggagatttttccttgattagcgttcttcttgttgatgaccacgaactggtgcgcgcagggatacgacgcattcttgaagatatcaaaggtataaaagttgtcggtgaggctcagtgcggtgaagacgccgtaaaatggtgccgcggcaacgctgtcgatatcgtgctgatggacatgaatatgccgggcattggcgggctggaagccacgcgcaagattgtgcgttatgcacccgacgtcaaagtcatcatgttgaccatccatactgaaaaccctttgcccgcgaaggtgatgcaggcgggtgccgccggttacctgagcaagggcgccgcgccgcaggaagtgattaacgccttgcgttccgtgcatgccgggcagcgctatatcgcgtctgatatcgcacagcagatggccctgagtcagttggaaccgcaggctgaaacgccgttcagctgcttgtctgaacgcgagttacagatcatgttgatgatcaccaaaggcaaaaaagtgaatgagatctcggaacaactgagtctcagcccgaaaacggtgaacagctaccgttaccgcatgttcagcaaactgaatatcagcggcgacgtcgaattgactcacctggccatccgacatggattgttcaatgcggagacgttgttaagcagtgaatgaccgttttgatgccaaagccttcctgagtaccgtcaccagccagcccggcgtctaccgtatgtatgacgccacgggtacggtgatctacgtcggtaaagccaaagacctgaaaaagcgtctcgccagctattttcggcagcaggtcagcagccgtaaaaccgagacgctggttaaaaatatcgcgcaaatagacgtaacggttacccacaccgagacagaagcgctgctgttggaacataactacattaaattgtaccaaccgcgatataatgttcttttgcgagacgataaatcttacccgctgatttttctcagtgcggatacccatccccgtttggctgtgcatcgcggcgccaaacacgccaaaggcgaatatttcgggcctttccctaactcttacgccgtgcgcgagacgctggcgctgctgcagaagctgttcccaatccgccagtgcgaaaacagcgtgtatcgcaaccgttcgcgtccgtgcctgcagtatcagatcggccgctgtttggggccttgtgttgccgggctggtgagcgaagaagagtaccggcagcaggtggattacgtgcggctgtttctttctggcaaagatcagcaggtattgcaccagctgattgagcgtatggaagaagccagcaaactgcttaatttcgaagaagcggcgcgcattcgcgatcaaattcaggctgtgcgccgcgtcacagaacggcagttcgtgtcgggcgacagcgacgatctggacgtgatcggcgtggcgttcgatgccggtatggcgtgcctgcacgtgctgttcatccgtcagggcaaggtgctgggcagccgcagctatttccctaaagtgccgggcggcacggatatgggtgaggtggtgcagacctttgtcggccagttctatctgcaaggcagccaggcgcgtacgctgcccggcgagatcctgctggatttcagcctgccggaaaaagacctgcttgcggaatcgctctccgagttggcggggcgcaagatccaaattcaaagcaaaccgcgcggcgatcgcgcccgttatctgaaactggcgcgcaccaacgcggcaacggcgttgaccaccaggctgtcgcaacagtcgacgatccatcagcggctggcggaattggccaaagtgctgaacctgacggaaatcaaccgtatggagtgcttcgatatcagccataccatgggtgagcagaccgtggcttcgtgcgtggtgttcgacggaaacggccccgtgcgagcggagtatcggcgttacaatatcagcggcattactcctggcgatgactacgcggcgatgacgcaggtgctgaagcgccgttacggcaaggcgctggaagagaaaaagatcccggatgtcatcttcatcgacggcggtaaagggcagctcggcatggcgatcgacgtattcaaatcgctgaatgttacctgggacaagaataagccgctgttgatcggcatcgccaaaggcgccgaccgcaaggcagggttagaaacgttgttcttcgtgccggaaggtgaagggatttctctgccgccggattcgccggcgctgcatgtgatccaacacatccgcgacgattcgcacaatcatgccattaccggtcaccggcagagaagggcgaaagtcaggaataccagcgcattggagctgattgaaggcgtagggccgaaacggcgccaggtgctgttgaagtatatgggcggactgcaacctttgttgaacgccagcgtggaggaaattgcaaaagtgccgggtatttcacaagcattggcagaaaagatctacaatgcattgaaacactgagggcaatgtagcaacatactcttaatttccactctagccagatagttaccgtagcattatgcaattgaatataccgacttggcttaccctgtttcgcgtagttctgatcccattctttgtgctggcgttttatctgccgttcaactgggctccgatggtttgcgccgttatctttgtgtttgccgccgtcaccgactggtttgacggcttcctggcacgtcgctggaaacaaacgacgcgcttcggggcgtttttggatccggtcgcggacaaagtgatggtggcggtggcgttggtgctggtggctgagcactaccacagctggtggatcacgctgccggcggccaccatgatcgcccgtgaaatcatcatttcgtcgctgcgcgagtggatggcggaaattggcaaacgcagcagcgtggcggtgtcctggatcggcaaagtgaaaaccatggcgcagatgatgtcgctggtgggcttgctgtggcggccggatcgttccgtagagtatgtggcgattggcttgttgtatatcgcggcggtgctgactttctggtcgatgttccaatatttgaacgcggcacgcaacgatttgctggaaccgtgatcgatacgctgcaaaaagcggcaaacgatcgtggtgtgccaacaattttattgactcatcacgtcaggtaagtagaatgaatcgcatcagacgacaacgatgaattgccgaaagatagcaaagaaatcagtaagttctggtaatgcgggaatagctcagttggtagagcgcaaccttgccaaggttgaggtcgcgagttcgagcctcgtttcccgctccaaacattagcctgttgaatcttcgtgattcggcaggtaagaaaaaggggcttcggcccctttttcgttttctattcctttgccgtccggcgaaacctttcttcatcttcctgcatcgattcttgtccctatatctcctgccattttcataccgcaggatactcctgaaaacaggcacatttgattggatatcatgtcgatgctctgtggggtattgatgccgagccatcgtgcggcgtacaacgcgatgtgagtctccagttctgcagttgcgttggtcgttcagggcggtggcaccgaagattgcgcgatgtccccatcgcgatgtccccatgatgatgctttgcccggtaccccatgatcgtaagcaaatgaaaagccggggagggcacgggtaagcgattcctgtcgagaaaaaagatccgatttgcccgtgaatccctaagccgatgcatataaaatcaacattccgcttgcctttccgttggcattgtgaacagtgcgcccacaaaataagcagttgaaagcgttagagaactttttgctatttcggggggttgccaaggtggggggtttagtccataatgcagtccatcgattcggcggtgacgaaataaattacttaagaatcagatgattaagataagcgatttcaacatcgcgattgaaaagaacaaaacgaagtgggtgaatcaccggctttggcctgaaaaggcaaacagaataaaggcgcgttaacaaagcggttatgtagcggattgcaaatccgtccagtccggttcgactccggaacgcgcctccaactttcccgagcccgggtggtgaaatcggtagacacaagggatttaaaatccctcggcttatggctgtgcgggttcaagtcccgccccgggtaccagggaacaaaaataccgaataatcaaagcaataagtagtaatgtcgtagaccgccgagaggcggtttttttgtttttgtaattcgcgttacgcctgcattttttcctttcttgtcatgccgctaccctgcctgcagggagccccgcagggctccgaagtacaactcataagaaaccgaacgccgcagcgaggatccagccgaagacgcaggagacgctgacgccaatcaggccgggcagaataaagctgtggttgatcacgaagcggccgatgcgggtggtgccggagcggtcgaactggattgccgccagatcgctggggtaggtcggcaaaatataataaccgtagcaggccggcgctgaagcgacgatataggccgggttgacgccgatcgccagcgccaccggcaccagcgccgccagcgcggcagcctgcgaattgacgaatttcgacaccagcagcaggatcagcgcataggcccaggggtactctttcaccagcacgcccagcgtggcttctatctgcgtcaggtgcgcgccgaacatggtttccgccatccaggcgacgccatacaccgccacgatggcgatcatgccggaacggaacacctcgtttttagagatagacgccgggttggtgcgggtaatgataacgatcaacgccccggccatcagcatgcacatctggatcaccagaaccatggagagcggcttgccgccgaagctgggccgcaggccggaaaaggcccccagcaccgccaccagggcgatggtggcgaggaaaatccacatggcgatccagttgctgcgcggcaatacccgatccagcagggtagcggcgtcgccgtagacatagcgatggttctccggcaccgagatgaacttctggaactccgggtctttgtccaggtctttgccgcggaaccagctgaagatgccgatcgccagaatgccgcacagcgtcgaagggatggtgatagacagcagatcgaggaattccagatggcggccattgaaggtgtagctgctgagcattgccaccagtgacaccaccgccaccgagaccgggctggcgataatgcccatctgcgcgccgatcgaactggccgccatcggccgttccgggcggatattatttttgatcgccacgtcatagatgatcggcaagatggtgtacaccacatggccggtgccgcacaggatagtgagaatgcaggtgacgaagggggcgatgatcgagacataacgcgggttgtgccgcagcatccgctcggcgatctgcagcatgacgtccaacccgcctgaggcttgcagggtggcggaggccgccaccaccgcgatgatcaccagcatcacgtctaccggcggtttgccgggctgcaggtgaaagccaaacaccaggatcatcaaaccaataccgcccagtaaccccagcgcaatgccgcccttacgcgccccatacagcaggcatgccaatataaccgctaattgcagaaagaaatccatgatagatacgccttaataatgttgaacttaactgcgttcagtttccggcggtgtttacagtagaaagttgttttaaatctaaaggcgctaaaaaattgtggttattagctctaaagagtgatgacggtcacgttcagagaatctgaagagcaggcggctgacgacatcagcacgaaaaagcaagttaagaggtcagacctctcctatataaccggtttaccaccagaggagagagcaatggatccgacaaaaatgaccgggctggcgttattacaggctgcgatggctggcaagatcccaccggcctcgatcgctgaaaccgtgcccatgaaaccggtcgcggtggaagaggggtatatccgcatcgcggcgcgggccgacgggcgccatctgaatccactggggggcgtacatggcggtttcgccgccacggttttggactcggtgaccggttgcgcggtgcacagtacgctgggcgcggggattggctatggcaccgtcgatctgcaggttaaaatgttgcgccctgtgccgaaggaaactgatctgatcgccgaggggcgtctggtctatgcggcgaagaacgtcgcttttgctgaaggcacgctcaaaacggcggaagggaagctgctggcttcggcaaccgccacttgctttattattcgccccaccgaacaagcaccgcaataacctgctttttatcgggcttcgggctatcaacccggagccggatgcatttatcttctatcttcggctgcatgccttgctgcgctacgatggcaggcgcgatacgccattgtggtctagtattcttgggtgaaaatttatcggggtgattatgcagccgtataaagaggttgagtttgatcatgagctttgtctggcgatcggcaaagccgtattagacgtggtggcgcagggggaagaaaccagcgctccggcggtgatgaacgcgattgagcggtcggtggcgcagggtctgaatgacgacgaaaccgccatcgccgacgacgccctggatgtgatggctcgtctcatccacggtttcagattcattaatctcgcgggtgaagaggatactccccatgcattggttgaatttcaagcgctacaagagtgacgttgccaaacaggccgtgccgccgcatttgaatgcggctgagtttgcgcggcattacgccgacaagccgcaagccgatacggaagagtacctttcgttgagcggggagatgtgctgggatgcggtggtgctttgcgctcaccgttcaggtgcgctcagcaaggcgaaatacaagcagctgtggctgacggtgttcgataagcaatataaacatttcgtcagccctgatgataccgagatccgcaccatggcggatatgctgcgcgcgccgcagggatgttttatcggtatattttccatgcgcgatgcggcggcgccccgattgctgcatgccatgatcggcaccggtgcgggatttgccgcgggcaataaaaatctttgcatcggcgtgggcggcgcggtcggttgggaaaatctcaatctggcgcgcgatctgcgctggcagccggaaggcggttttttacgccagggcgacaacgaagtgctgcgcattttttatcggcctttccccgcctgaaccaccggccgcaggctttttaggataaaagaccgccgcccggcggttttttgttgcttacttaaacccgccgttgcgtatgaactcgagaccggcggtggtgatccgcgtttggtgcggatcgatatcatagttgttctcgtcgatgtcgctcatcacataggcttgtatcagccccttggttttaagataggcgaagggatcggcgaaggcgtgcgggctggtggcgtcctgcttccacagttcgtaggttttttcatccagcgtgccggggtgattggcggccaggtgggtcaggatctgattgtagaactcatagtcggtcatgatgcggtcctctttatcgcgagcgacagtctcggaaaatggcgtaacgtctatcaatcatagccgaagtttcccaccgcctgcggcggcgtcgggttagccgcgttggctttcaatccagtgaaacagacgtgaaatgctgaaggtgatatcgccaatgttgaaaagcgcgccgagccacagggtcagcatcaccaggatgccgataatgatgggaaggtccattttgctcatgatcatgttcttcatcaataaagagtgtgcggcaaagcgtaccaccaatcctgattgtcataaaaatgcgctggcattatttcttttgaaatcaaagtaaaaaagccacccaaacgggtggctttcagcggcgatcagtccagcttggggtgctggtctatcaggatctgctttttcttttccagctcggcgatctgcgcgttgatgtcctcgactttctgttcgatgttgtcgtaggtctcctgcagcagttctttcgcttcggtacggtcagaagcggccggcgtcgcgccgcgcagcggcttgttggcggtctctttcatgtacagaccggtgataagaccgatcaccgccacaaccatcaggtagtaggccggcatgtacaggttgccggtcgcttcgaccagccaggcagcgacggtcggtgtcgcaccggcgatcagtaccgaaatgttgaacgaaatcgccagcgcgctgtagcggatgtgcgtcgggaacattgccggcagaatcgaggccattaccccggtgaaggagttgagcagcaccgccagcaccagcaggccgacgaagatcaggccgatgacgttgctgttgatcaaaatgaagcacgggatcgccagcgccaacaggccgatgctgccgccgatgataaacggcttacgaccgatacggtcgctggtcaggccgatcaccggctgcacgaacagcatgccgatcatgatggcgatgatgatcagaacgccgtgatcctccgagtagtgcaggttatgcgacaggtagctcggcatgtaggtcagcagcatgtaataggtcacgttggtggaaatcacgataccgacgcacaccagcaaacttttccagtgtttggccgcgatctctttgaacgaggttttcggcggattttcgatggcgttgcgatcctctttctccatcttatccacgtgctgctggaacgccggggtttcttccagcgcatggcgcagatagagaccgatcaggcccagcggggcggcgatgaagaacggaatgcgccagccccagtcgaggaagttggcttcgccgacgatgctggagatcagcaccactacgcctgcacccatcacaaagccggcgatggagccgaaatccagccagctgcccataaagccgcgtttgcggtccggtgagtattcggcgacgaagatcgccgcaccggaatattcaccgccgacggagaagccctgcgccagtttggccagcagcagcaggatcggggcccagatgccgatcgacgcataggacgggatcaggccgatacagaaggtgctgaccgccatgatgataatggtgaccgagagaactttttgccggccgaacttgtcgcccatagcgccgaagaacagaccaccgagcggacgcaccaggaagggcacggagaaggtcgccagcgcggcgatcatttgtacgccgggagaggcgccggggaagaagacctggccaagcgcataggcgacaaagccgtatacgccgaagtcgaaccactccatcgcgttgcccagggccgccgcggtgatcgccttcttgagtttgctgtcatcgatgatggtgatgtcgttaatgtgcatcggtttatgtcgtttttttcttaacttcatataatcatcccttaatgaattattcgttgttcgtgaaagcgtcatctccgttcactgttgttttcgagttatcaaatcggctaatcgaatcgcgattcaaaacgattcattatccacatttaagttgggatgtggatcacaaaatatcgtcgtttatgccaaggttatgtcatttaggtgactaattattttgcatctatagcttaacgttatatcttgcggcgatcaaatccagcagtttaacttaagtatttgcaccgatttggtgcgagaatagtctaataattgtgctatttgacggtttttcgtctgattgatgatgtttcaagtatagagagtacgggagataaaacaggaaaaattgatgtgttcgtcgctaaaaaaacgcctgaccaactggccaggcagtttggattagggcgccgacgaaccgccgaactccagatagattttcgccaggttctggtactgcgcgaagcggttttcatccaccgccagttccgcctgacggcgttgttcctgagcgttcagccagtcggtaatggtgacggcgccctgtcggtaacgcacctcgttcaaccgctccgatttacgcgccaacgccaatgaggcgcgcaactgcgtctcctgcgccagcagctgcgtgcgcagtgacagcgcattgttcacatcgcccatcgctttgtacagcgcctgcttgaaggccagaacttgctgttcatagtcgttgcgggcgatcttgatttccacgcccatttgccgccactgcaggaacggcagcgtcaggctggcgctgaggctgcccgtcgggttgcgcaggaattccagcagcgcgctgctgctggcgcccagtgaaccggtcaggctgaactcgggatagtattgcagacgtttttcatcgacgttggccagggcggcgcgcaaccgcagctcttgagcgctgagatccgggcgacggctcaggacgctggcgggaatgccggtgttgatctgcggcatcgccgccgtcggcaggcgtgcgggcgcgatggtggcctggcccgaaggcgcacccagcagcaccgcctgttcgttcagcgcctgttggcgttcgtgctgcaatgccagcagccggctttcctgcgtcagcaagctttgctccgcgttcaccacgtccagcgccgagatgctgccggcctgataacgggcgttggccagccgtagcgtcgttttggcataggcgatgctcgcccggctgacgtcgatctgctgattgaggaagccgatgcgccagtaattcgtggcggcatcggccagcagcgtcaggcgcgccgtttgcagatcctgctcggaagcctggctggcccactcggcggcgtcgcgctggcgcgccagtttaccccacagatcgacttcatagctcgtagagagtgtcgcgttgctggttttattccacgcggaggactcggacagcgggcgattaatgctgctgcctaatgaggcgctgacgccgggcgcggtgctgatgccgacgcgttccgcctcgagccgcgcgcggtaaacgcgcagcacggcggcggccagatcgttattgctcgccatcaccagttgcagccaacgatcgagctcgggatcgtggaaatcgcgccagtcgaacggcgtcggcgcggcgttgtcggcagcgtattgccaccccgcaggatagttgacctgcggcgcccggtagtcgcttttcagggcattgccgcagccggcggtgagcagggcggcgaggcttaacgccaggggagataaaattttcatgggttactcgctggccaatgaaacgaccggatccatccttgccgctttgcgggcggggagataaccgaagatcatgccgattaaggttgaacagaaaaatgccgtggcggcggcttgccaggaatagatggcggtgaacatgccgcccgccagcgaggtgaacagcgacccggcggcgaacgatagcgcgatgcccaaagcgccgccgatcagacagaccagcaccgcctctatcatgaactgttgcatgatgtcgctgcgccgcgcgccgaccgccatacgcacgccgatttcgtgggtgcgttcggtcaccgagaccagcatgatgttcatcacgcccaggctgccgatcaccagcgcgatggacgccaccatcaggatcagcaggctaaaagtcattgacgtgcgttcgatggactttcggattttatcgaagttgtacaaacggaaatcttttacgccatggcgttgggtcaacagctgtgtgatagcggtgacggccgattcgctggcgacattgtcctttagccgaacggtgatgccgctgagcgtcggtttgcctaccatgcgatacatcaccgtgctgtagggcatccaaacagtgatgcgattgggcgcgtagttgcgattgcttttcgccacaccgatcacccgtgccggcaccgagccgagaaacacgatctggccgagcggctcgacgccgaaatcgccgaacagcgcctggcgcgcattgtcgtcgatgatcacttcctgcagcgcattacgatcgtcgcggaaagtcacgccttgtaacagctcgacgccgttaacgcggaaatagtcgcgcccgacgccggtgatcgaggcggtggcggatttgctgcgaaaacggatgctgtcggaagcgtctacttccgggctgacgctgtcgacgaagctttgctgcgccagcgcgtcggcatcggccggcaccagggtgcggatgctgtcgatggcgtcgtcgaagaaatcgcggcccggatagatgcttaccacgttagtgccgagatctttgaggttttccagcgtgcgctgtttggcgccttcgcccagcgccactaccgtgaccactgcggcgatgccgaagatgatgccggtcatggtcagcgcggtgcgcagacgatgagcgttcatcgctttcagcgccatgtgcagcgattcgcgggtgcggtcaatcaggcgttgccagccgctttgccggctgcggttcggcggcggcaacgatgggccggacgccgatttgcggccgctgtcagcgatgatcttgccgtcttgcagttcgatgacgcgctgcgcatgttgcgccactttcatatcgtgggtgacgatcaccacggtatggccgcgctgattcagttcgctcaggatcgccagcacttcctggccggattgggtgtccagcgcgccggtcggttcgtccgccaggataatttcgccgccgttgatcagggagcgggcgatgctgacgcgctgctgttggccgccggaaagctggccgggcttgtggtcttcgcgtccctccaggcctaaccgcgccagcagttgcgccgcccgcagccgccgctgatcgcgccgggcgttggcgtagatggccgggatttcgacgttgcccagcgcgctgagatcgggcatcaggtgatagcgctggaagataaaaccgatatgttcgcggcgcaggcgggccagttcgtccggcgacaggtgggcggcgttctggccgctgatgtagtaatcgccgcgatccggcacgtcgaggcagcccatgatgttcatcagcgtcgatttgcctgagccggaagcgccgatgatcgccaccagctcgccggcggcgatggtcagatcgatgtctttcaacaccgttaacgcttgaccgccgttggtgtacgttcggctgatgccttttagttcgatgatcgcgttcacaggaagatgccatcctcagccgatttggcggcgggctgcgacagcaccacggtttcaccggctttcaggccgctgaggatctgaatgtcgacattgttggtgatgccggtggtcactttgcgcgtttccaaccgctggtcctgggtcagcacctgcacctgctgcatttctccttcggctttatgcaccgcctggatcggcaccagcagggtgttcttcgcgtcgccgagcagcaaggacacctgcgcggtcatggcaatgcgcaggcggttctccgggttgggtacgtccagcagcgcgttgtaatagaccgaggcgttcgaggtgccggagccggaagcggagctggtgccggcgagcgaatcgtctttcatcaccgattccggcgccagctcgatggtgcgcagcgtggcgtcgtaccgtttatccggatcggagaaaatagtgaagtacgccttttgccccggtgaaatgcgggtgatgtcggcttcggagatctgcgccttgatggtcatcatatccaaccgcgccagcttgacgatggtcggcgcgctttggctggagttgaccgtttgcccctgctgcgtgaccacggcgataacgatgccgtccatcggcgcaaccacgcgggtatagcccagatcgatttttttcttctcgacttcgatctgcgattgcaccaactgcgcattgagcgcctgcagatcggcgcgagtggtggcgagcgaggcttcggcagtttcgaagtcttcccgcgaactggcttcgtcgttcagcatgcggcgctggcgtttgaaacgcgactccgcctgtttcagcaaggcctgtttggctaacatattggctttgactacgttcagcgccgcctcggcgttgcgcagatcgttgcgctgttgcagatcgtcgatgtcggcgatcggttgccctttggtgacgcgatcgcccagcttgaccttcagcgatttgacttcgccggagacgcgggcgccgacgttgacgcgttcgatggcatccagccgcccggtggccagcacggcgttttcgatatcgcccaggcgggccggcgcggtaacgtaatcctgctgcggcgggcgttgccaaaagatggccagcgcgacggcgacggcgatgaaaacgatggcggcgagcaacgccagacggcgggaggggagtttcagtgatgacatacccaggttttccataacgataaaagcggcggttccagtctgccatcatggcagcgccagcttgaactggcgctaaacgtgaggcgctttcccgctggaaaggaaatagtaaaggctttcccgttaaagatcacggtgagttattatccgccgggtgtgcaaccggctgcagggcgcgttatactggctaaaaaaccagtattcattcatcagcaggataatgccaccgccatgatgccaaaccgcctcgagccggaactcgacatttatcaatacccggagcacctgcgcgcctgcctggcgccgttgcctaaagggccgggcgtgtatgtgtttcacggtcaaagcgagagcctgccgctttacatcggtaaaagcgtcaatatacgcagccgggtgatggcgcacttccgcgcgcaggacgaggctaaaatgctgcgccaaactcgacgcatcagctttatcgagaccgccggtgagttgggcgcattgctgctggaggcgcagttgatcaaacaacaacagccgctgttcaacaaacgtctgcggcgctcgaaacagctttgcgcgctgcgcttgcaggcagatgcggtgacgattgctcacgccaaagagatcgacttcgccgtcacgcccgatctctacgggctgtttgccaatcgccacgccgcgctggaaaagctgcgcgccatcgccgacgagcatcgtttatgttacggcaagctggggatcgacaagctgcccgccgggcgagcctgtttccgttacagcctgcgcaagtgcgccggcgcctgctgtggcgtggagtcggcgcaggaacatgctctgcggcttagcgcggcgcttgaacagttgcgcatcgcctgttggccgttcgccgggcgcgtggcgctggaggagcagggcgagacgctgcgtcagtaccatgtgatccacaattggttttatctgggctcggtcggcaatctggcgcaggcgaagttgctgcagagcgcggccagccactttgacagcgatggctacaagattctgtgcaagccgctcatggccggcgattatcggattattgcgctgccgtaatgccataacgctatcgataacctaagacttatctgtaaattcagggcattatgctaaaaaagcttgagtccataatgttgttatggataatggcaccccgaagcgaaggaacgcgctattaactcagttggcagagtgattggttttataatggcttgttttggcttgaaaattgatagacgcgggttcgagtcctgcatagcgcgccagctttctttccttcatctcaccgcgcttatcgtaaagcgcacccgggttgatttgcactatcggctcctcgttgggattttcgggtgtgctttaccgtaaccgctggctttccttcctctttctctttcgatcctttgctaaactgtaatcaggcaggcttgctgcccggcaacaggaggtcgatatgtctcactccgagcaactgcaggagctcttgcaacgcgtcgccgcccttgaggcgagggagaaagcgctgagcgccgcgtccaacgcttaccaggcgattatcaccaccatgttgggcaatatggagaaggtcgaacgtgaccggatcatcgccatgatcgatcaggcccatgaaatcgcctacgctcgcgccattcaacgcagcaacgaaccgcaaaagcaaaaaatcaaacaggccgacgacgtcgcccagcgcatgttcatgtttgcgcaaggcaaagccgctcagccgcgctgaagccgaactataacagttgccgccattaagttggctaactgatctacccggcaaaactgtacttgtgttacttttagcggtgagatttgatggcaatgctgtttccagcataaggttgtaacgatggacgcgattaaaagcatcttggttaaagagattgaacagatcaatcggcgcgaggggcgcgacggcaagccgcgtttcaacagcgaattcgcccgcactcaccgctatttgtgccttgccatgttcgccggttacttcgcggtgatcgccgtgatgtatcaggtgccgtatatggggatgtatgccttcctgggcttcaccgctttcgtgctgttcatgttcgccatgctgctgatcgagatccggccggtgtatcgtttcgaggacatcggggtgctggatttgcgggtttgctacaacggcgaatggtacttcacccgcgcgctgtcgccttatgcggtgcagcagctgctggatgagccgtccatcggcgccgcgctgaaacagaagatgcgaatcatcatcggcaacaagggcgaaatcgatttctacgacgtgtacgacatggcctacggaaaaaagccgcaggatgaaccgtctcagctggcggcggcgaactgaaaggtttccggccggcggcttgtcgattatactcagcgtttgaacgcgaagcagaatgaggaccaagcgatgagtgatgatattttcgattttgatatcgatgccgaactggcgaaagccgaagaaaaagcggcgcagaaggtaaaagaggtccccgagttcctcgaagacgaagcggactgcgaaggttgcaagatctgattgcctgccccataaaaaaaaccgccgcggcggttttttttatgtctgagcgtcgcgcggcgtcaatccagcacgaatccccagatcaggaacgccgccaccagaatcaggcaaagcgcggacaccgtcaccagtattttccccagaatgtctttttcttgttcctgctgcgtcacgttgaaattatccaattaaaagtctatggaccaaaccggcgatgccgagatcgagcgccgctacgcccagcgccatgatcactatcaccgaaagaaatcgagtcttgccgttcacttccctagtccctatcggcgccgttatatcaaagggatataatttggcggcgccgtactgcatacatcgtgatagagattaagagcgttcttaaggccagaagttccctcatctggtaggccggcgcctgagcggcagcgttagtcggtcacgatccgcacgcctatcttgctgacttgattgccgtccatttcggcgatggtccaggtcagaccgtcccattccacctggtcgccgatcaccggttcaccgccgatcagctgaatgacgaactgccccagcgtctgctgctcgtcgacgtcgtcttgcagattgagaccataaacctgcgagatgtcgcttaaacgggcgtcggattgcaggataaagtcgccgaagaagcgttcgtcgagcgtcacggccggcgcctggctgaacagcttgccgaggatcggcagatcgtgctcatggccgatgacgcacagaatatcgttctcccgcagccgggtactgccgctaggatggagcagctctttgccacggaacagggcggcgatgcgggtattgggcggcattttcagctcacgcagcgccgcgccgacgcaccagttttccgccgaaagctgatacacgaactgttcccactggttctccgggtgcacgtccagcccaacgcgggagatcggcgtcagcgccggcggcacgatcaccttggcttttttggcggcgaacgacagtgtggtgccctgcagcagcagggagaccagcaccacgaagaacgccacgttgaagaacagctgggcgttgggcagcccggccatcatcgggaacaccgccaggatcaccggcaccgcgccgcgcaggccgacccaggaaataaagccgcgctcgcgcagggtaaagctgcggaacggcagcaggccgataaacaccgacagcgggcgggcgaacaggatcatccacagcgacagcagcagggcagggatggcgatcggcagcagctcgtgcgggttaagcagcagcccgagcaccaggaacatgccgatctggctgagccaggcgaggccatcgaaggtttgtacgatgccgtgacggttgcggatcggccggttgcccagcagcaggccgcacagatacaccgccagaatgccgctgccgtccagcgcggtggtcagcgcgaaaataagaataccgccgcttaccgccagcagcggatagaggccgtccgccagtttgatgtggttgatcagcgtcaggagcagccagccgccgcccagaccgaagacgatgcccatgccgaactgctgcatcagatgcagcgggaaggtccagctcagtgcggtttccccggcggcgatcatcgcaatcagcgtgatggtgagaaacaccgccatcggatcgttgctgccggattcgatctccagcgtggcgctgacgcgttcgttcaaacctttgccccccaaaagagagaagaccgcggcggcgtcggtggaaccgatgatggcgccgatcagcagcccctgcagcagatcgagattgaacagccaggcggcggccatgccggtcaggccggcggtgatcactacgccgacggtggcgagagagagtgccggccacagggcgacgcggaaagagctgacccgggtacgcatgccgccgtcgagcaggatcaccgccaacgcgaggttgctgaccagataagcgaccgggtaattgctgaagacgatgccgccggggccatcgacgccggccagcatgccgatcgccaggaagatcaccaggatcggaatgccgagccgggaagaaaatgagctgagcagaatgcttgcccccaccagcacggcaccgatgacgaacaaactgttaatggtgctggcatccaaaatatcgctctcctgaggctgggggataggggcactgcgctggtgtcgatgataacgtgtttagtgggtaaaacgccaaggctgattgcgaaaacaaccgatcaattattgccctttggtgcgattaaccgaataaagtgaggggaagagggagaatgctgtcttttatccaacattatcaggctgctgtatttctgctttggcaacaatgcccgatcgtggctgagggaaaaaccattaagcccgcgccggcaggcttaatggtttgcaggcgcggtaggattaatgatcgagcgattccagcgcccgtttgatcagctcggtggccagcttgctttccgcttcggaaatgccgtcgagattgaagttggaaagctcagcgaccaaaacgctgcgttctttgccgctgatcgaagcgtccagcgcggacagcaacctgccgaggatcttcagcagggtggcgttttccgctatggcttcttgagctggggtgttcttatcggtcattcaaaatcctctctgtcgtgacggaagggagatgcagctaacgccaccgaataaattaaacgatcgcgcagcccttcgggggtgttgagcccaatcactaccgtaaggcagggatccggatttctacttatgcattgcagttataacggctaggttatctatgcagccgtatcactttgccttaacggtcgacgccaggctgagcaatgtgtgctctgtatgcaaaccaccagtataggctttttacgcggcggcaatatgacagaagccccctgcaaacggtcgggtttacaggggaaaggttattgcggtttgccggagaacaggaagcgcagcaccggaatgcgcttgtgcagttcatatagcgcgaaggccagagagaacacaaacagcaggcccagcaagaatcccaacaggttgttgccgatatacggcgtcacgaaagcgccatatatcagggttaacggatggtgcaccagatatataaacagcgaggcgttgaccagataggtgatgcgcggcgagtgataattcagcaggttatgcccgaaagagaacacgacgttggtcatcaggatccccattagggttttgatcaccacttccagctcgaacatatagctgctgtgcgccaacagcttttggttaagcatatatgcgataaacagcagcagcgaaccgagcagtgccagcggcgagcggcgcagaaaaatctccttaagccacacatacttaaacgcataggcgccgaggaggaagaacggcaggtagaacatcgtctccatcaccacgaaattgaacaggccgttggataatagctgcggggcgaaaattaaaataatgcggtgcgcggccgaatagcataccgcataaataaagaaatacagtgagatgtttcctaatccacgcattctgtttattagcgttggaatatattcacgggtttgacgcttgattttacggaacagataaaaacaggcgcaggttaacaatgacagcgtcaataagaaccacagatgagaaaccaattcccaaactgttacatttattttctgatagagagaaaattcatcccagccgtttaatttgtcggtgaaatatttcagcatgaaaaactgcggcaccgtgatcagcgggatggagctcaacagcgggatcgccacccgctccagcctgaccttcagccactggtggcgctcgtagcgctcgtaaagcatgtaggagaagtagccggatatcacgaagaacacctgcatgcggaaggcgtggatgaagtcgttcagcaccgtgagcgagaaggagggcgaagcgctgttcaccgcccaggcgtggctggaataaatcagggagaggtgaaacgggatgccgagcaacatcaaataggctctgatggagtcgaggaaaaactcgcgctgtttgctgcctttagtcatagattaccgctggtgatttaatcgagagttcattaacacgcttaataagtcgtcaaacgttaaattgttatccggaaccctactatagccccccgcatttttccatagcgtcttgttgcgcggcttgctacgctggtgttccatcagctgcttaaacaatgagccgtaaacatgaaccatccatttatcatgttgtcggaaagctgagtaatccattaatatggatttaaatgctttgagcacacgaatagggggggatgtgctagttaatatattatccggacaaccacgcgccgcgagcgttcgttggttaggtgcgaccgtattgttcacgctgttcagttcgccggcttgggccttttctattgatgatgtcgccaagcaggcgcaggatctggcggcgaaaggtttcgaagccccgaagagcaaccttccttctcagttccgcgagatgaagttcgcagactatcagcaaattcagttcaatcacgataaagcctattggagcaagctgaaaacccctttcaagcttgagttttatcatcaggggatgtacttcgatacgccggtgaaaatcaacgaagtcacctccaccagcgtaaaacagatcaagtacagcccggattacttcaacttcggttcggtcaaacacgaccctgaatcggtgaaaaacctcggctttgccggttttaaggtgctttatccgatcaacagcgccgacaaaaacgatgagatcatgagcctgctgggcgcgagctatttccgcgtggtgggtaaaggacaggtttacgggctttccgctcgcggcctggctatcgacaccgctttgccgtccggcgaagagttcccgcgtttccgcgaattctgggttgagcgtccgaagcagggcgacaagcacctggtgatttatgcgctgctggattccccgcgcgccaccggcgcttaccgtttcacggtgatcccgggccgcgacaccaccgtggacgtcgagtctaaagtgttcctgcgcgacaaggtgggcaaactgggcctggcgccgctgaccagcatgtacctgttcgggccgaaccagccgtcgccgacgctgaactaccgcccggcgttgcacgattccaacggtctgtctatccacgccggcaacggcgagtggatctggcgtccgctgaacaatcctaaacacctgtccgtcagcacctataccgtcgagaatccgaaaggcttcggtctgctgcagcgcggccgcaacttcaaggattacgaagatctggacgatcgctacgatctgcgcccgagcgcctggatcgaaccgaagggcgactggggcaaaggcaaggtcgaactggtggagatcccgacggcggatgaaaccaacgacaacatcgtcgcgttctggacgccggataccttgccggaagccaaaaagccgctgacgctgagctaccgtttgaacttcacccgcgatgaagacaaactgcattcgcaagatatcgcctatgtggcccgtaccatgcgttcgaccggcgacgtgaagcagtccaacctgatccgcgagccagacggcagcgtggccttcctggtcgacttcgttggcccggtgctgaaagggctggacgccaataccccggtcgcttctcagatcagcatcggcgacaacggtgagatggtagaaaacaacgtccgctataacccagtgaccaaaggctggcgcctgacggtgcgtctgaaagtgaaagacgacaagaagccggtagaaatgcgtgcggcgctggtcaatggcgataagactctgtcggaaacctggagctatcagctacctgccaatgaataagcctactcaacccgcccaggattatcttgcggcgctgcctctgaccgccgagcggtcggaggcgctcaaccctcaaacggcggatggcgctcaggcactggaggcgctccatcggcagatgggcgccgccgacgccaacgttaatagcctgtcggcggatgacgtggcgctggcctcggtcaaaccgcgtatcgaaaacgcctggccggatgcggtcagcgatgacgacttcgataccgacgccgaagggcgcgccattctgaaggcgacgccgccgatcaaacgcaccaccatgttcccggaagcctggcgcaccaacccggtggcgcgcttctgggattctctgctggggcggtcgccgcacaatcggcacgccaccaaagaggaggccgaggccgagaaccgctggcgtaccgtcggctccatgcgccgctatgtgctgctggtgctgatgctggtgcaaaccggcatcgccacctggtacatgaaaaccatcttgccttatcagggctgggcgctgatcgatcctatcgccatgctggatcaggacctgatgcagtcggtgttgcagctgctgccgtatgtgctgcaaaccggcattctgatcctgttcgccgtactgttctgctgggtctcggccggtttctggaccgcgctgatgggcttcctgcaactgctgatcggcaaggacaaatacagcatttcctccaccatcaagggcgatgagccgatcaacccggcgcaccgcactgcgctgatcatgccgatctgcaacgaagacgtcgaacgcgtgttcgccggcctgcgtgcgacctatgagtccgtcgccgcgaccggtcagctggaacacttcgatatctacgtgctgagcgacagctacgatccggacatctgcgtggccgagcaaaaagcgtggatggagctgtgccgcgatgtcgatggccacggccgcatcttctatcgccgccgccgccgccgcgtcaaacgcaagagtggcaacatcgacgacttctgccgccgctggggcggtgagtacagctacatggtgatcctggatgccgacagcgtgatgagcggcgaatgcctcaccgggctggtgcgcctgatggaagccaacccgaacgccggcatcatccagtcggcgccgaaggcgtccggcatggataccctgtatgcgcgcgtgcagcagttcgccacccgcgtttacgggccgttgttcaccgctggcctgcatttctggcagctgggcgagtcgcactactgggggcacaacgccatcatccgcgtgaagccgtttatcgagcactgtgcgctggcgccgctgccgggcgagggctctttcgccgggtctatcctgtcgcacgacttcgttgaagcggcgctgatgcgccgcgccggctggggcgtgtggatcgcttacgatctgccgggcagttatgaagagctgccgccaaacctgctggacgagctgaagcgcgaccgtcgctggtgtcacggcaacctgatgaacttccgcctgttcctggtgaaaggcatgcacccggtgcaccgcgcggtgttccttaccggtgtcatgtcctacctgtcggcgccgctgtggtttatgttcctggcgctctccaccgcattgcaggtggtgcatacgctgatggagccgcaatacttcctgcagccacggcagctgttcccggtctggccgcagtggcggcccgagctggcgatagcgctgttctccaccacgctggtgctgctgttcctgccgaagttgctcagtattgtgctgatctgggccaagggcgcgaaagaatacggcggggcgttccgtctgttcatttcgatgctgatggaaatgctgttctcggtgctgctggcgccggtgcgcatgctgttccataccgtgttcgtggtgagcgccttccttggttgggaagtggtgtggaattcgccgcagcgtgacgacgacgacacgccgtggggcgaagcgttccgccgccatggctcgcagatgttgctgggcctggtgtgggccggcggcatggcgtggctggatctgcgcttcctgtggtggttggcgccgatcgtgttctcgctgatcctgtcgccgtttgtgtctgtgttgtcgagccgcgcaacgctgggcatgaaaagcaaacgcgccaagctgttcctgatcccggaagagtacaatccgccgcgtgagctgttggcgacggaagaatatctgcatctcaaccgcaaccgcgcgctgaccaacggctttatgcatgcggtggtcaatccatccttcaacgcgctggcgacggcgttggcgacggcgcgtcaccatctgcgcgcgacgctcgatcgcaatcgtgaggagcgggtgaacgaagcgctgcagttggggcctgagaagctggtgaagggcaaacgtctggagctgctgagtgatccggtcacgctggctcgtttgcatcaacgcgtctggctgttgccggaaggcgccgcctggcgtgagcattatcagcagttgccgcacaacccgctggcgcaccctacgggccggcgttaattgctaatcggcaacgctcagacggggaatgcgcatggcgcattccccgttttttttacctttcgcttacgtgcgccggtgccggtggagaaagagaactgtgatagactgcggccgatgcgttgttcactcgcgaaacaaccccttgctcagagtcaatgtcgtgaagctctcttcctatcttcggctggcctgcgtggcggccggtgtgatggcactcaccggctgcggcagcattatcagccgcaccgtgcccggtgcggggcatggccaccagtactatcccggcgtgcagtgggatctgcgtgacacgccctggcgctacgtcacggtgatagacgtcccgctgtcgatggtggtggacacctttatgctgccgtttgatgcgcagcatggcccctacgagtaatttcgtttagcgggtggcgaacaccaccagctgatagctttgctgcccgcaatggaaaggcgccagcgccgtcatccccaacccttgcacgtgagcggccaacgaatgcggattgtcgtcgtcgataaacaacgcgcctacgtcatagtcatggcaggtatgcgctttgaccgcggcgtagaggcgcttcagcacgcctttgccacgccaggcggcggcgaggcagaccgggccgtagagaaacacccgctgctcactcagcggccgtccggcgaaggattgcgtggcgagcgtcaccagcatcgcctccaccaccggcggccgcggctgcgcgtcggcgggcatcaggcaaacaaaccccgccagttggttctcctgttcggccacccatatgccgatgccgcggttgatcgccgccagctgcgcctcattcatgcgcgatacgataaatccctgccgtttttggcgctcgtcgagcgcttccggcacgttttccccctgtagctgcaaaatggcggggtagtcggtagggcgggcccggcgaataatcatgcggcctccttggcgatgaaagcgtggtgcgggttaacgttcatcccactcatcggcggcggcctggccttcttcggtatccagcggcggctcgagctgaaagtcgccttcctcccattcgtaaagggtgttttcatctatccactcggcggtaatttccacctcgtcgtagtcaccgtcgaagatcgcctgcgccgccgcaccgctgcgcagcgtcagacattctaccgcctcgccttcttcttcgaagaactccgcctgccacatcgtgtcgccatcctgcattacgtacttttgcagattgaactgctggggcaccggcggttcgtcaccgccgccgccttcggcggtgtcgagaaactcttcgcgtgcggcctcgatggcttcttccagggttgcatacaggctcatgttcgcctccgttgacaatgagagtaaagcgtccggcgtgctgccggcgcggtgggggaaacgtcaaaactaattgttgtctcactggcgcaggatgcaaatttttttgttgtccgctttgcgacgatggttgtccgcaaagcgggagaagaggaggcgatggcgggaaataatgacgcgatcgttcactctggcgtcaggagaagcccatgttaatcgacccttcaagcaaataccgacctttcccgccggtggcgttgccggaccgccaatggcctgcgcgtacgctgcggcaggcgccgcgctggtgctccagcgatctgcgcgacggcaaccaggcgctggcggagccgatggataacgcgcgcaagcgcgaattctatcaattgttgttgcagtgtggtttcaaagagatcgaggtggcgttcccttcggcgtcgcaaacggattttgactttgtacgcgcgctgatcgacgagcggctgatcccggacgacgttacgatccaggtgctgacgcagtcacgtgacgatctgatcgatcgcaccttcgaggcgctgcagggggcgccgcgggctatcgtgcatctgtataacgccacggcgccgatgtttcgcgatatcgtgttccgccaggataaggcggcgaccgtggcgctggcggtgaacggcgcgcggcgcattcgccggcagtgcgaggcgcagcccgataccgcctggtgcttcgaatattcgccggaaaccttctgttttactgagttagagtttgcgctggagatctgcgaagcggtagcggaggtttggcagccggggccgcagcggccgatgatcatcaacctgccggcgacggtggaagtgagcacgcccaacgtgtatgccgatcagatcgaatggttctgccgtcacttcagccgccgcgccgatgtggcgatcagcgttcatccgcataacgatcgcggcaccggcgtggcctgtgcggagctggccttgctggccggtgccgatcgggtcgaaggctgcctgttcggcaacggagagcgcaccggcaacgtcgatctggtcacgctggcgttgaatctctatacccagggcgtggcgccgggtctcgacttcagccgcctgaagcaggtggtggaggtggtggagcagtgcaatcagctgccggtgcatcctcgccatccttatgccggcgagttggtgtttaccgccttctccggttcgcatcaggatgcgatcaagaaaggtttcgccgcacagcggcagcggcaagatggccgctggcaggtgccatacctgccgctcgatcccgccgatgtcggttgcagctatgaggcggtgatccgggtcaacagccagtccggcaaaagcggcgccgcctggctgttggagcagaatcatgggctggcgttgccgcgtggtttgcagattgatttcagccaggtggtgcagcgcgcgaccgacgatagcggcaaagaaatgagcggcgcgcagctgtggcgcttattccgcgatacttacgggctggtggagcagccgcgtttgcagctgttaagctaccagacggaaagccatggggtagaggcctacagcttcaacgcgcgagttgcctgcgagggagagccgctgcgcctgcagggggccggcaacggtctgctgtccagcgcggtggatgcactgcgtcagcgcttcggcttgccgctggcgatcgaggattaccacgagcatacgttggggcatcagagcgatagccgagcggtggcctatattcgctgtacgctgccgcaaggtgaggcgacttatggcgttggcatcgacgtcgactccgccagcgcctcgctgcaggcgctgttcaacgtcgccgggcgctatctggcgccaacgtcggcgcagtccggctgaaatagtcgctgggtgctactcccagcagcctgcggaacatggcgctgaacgcgctggggctgtcatagccgagatccagcgccacttccaacaccgagcggccggtcgccagcgcgtttaatgccgccagcaaacgggcgcgtcgcacccagtcgctaaaatgtagcccggtttctcgcaggaagcgtcgcgacagggtgcgtccgctgacgctgagatgagcggcagcctgttccagcgtccagggctgcgccagcgtggcctggatgtggcggcacagggcgagcaacgaggcttcgcgaggttccggcaggtgcagcggcaggatcggcagcattcgcaactcatccagaatcagttccatcacgcgctcatcgcgcccgccgctggggtaaccgggcgcaatctccatcgcacagataatcaactcgcgcagcagcggggaaacctgcactacctggcattgggccggcagatcggcgcgcgccaacggatcgacgaacaacgtcctggccgccacctggccggtgatacgcaggctgtgcaccactttcgccggcacccagacgccgcggccgggcggcaccacccagctgccgagccgggtcgtgacctgcaccacgccgctcaggctgtggatcagctgcgcgcagttatggtagtggtccggctcgctgtcgccgtggcgataatccctggctaatggctggacaggccgatcgggcggcagaacgtcgtgaaaaaacagcatcgtaagcaggctccgcgcggcaaaagggggaggacagcatgccatgcgtcgctgtttcacaccagtctgtggcgcggcacggtaaaatggtttataaaattatattatatgattttataaactgatggagaggcaatggatattgatgcgatgcgcaaggcggcggcgcaggccggtgcgatgctgcgtaccctgggcaacgaagatcggctgctgctgctgtgccggctcagtcagggcgagatggcggtgagcgaactggcgcaggcgctggatatccgccagccgacgctgtcccaacagcttggcgtgctgcgcgaggaggggttggtctccacccggcgagccggcaagcagatttactatgcggtggccgatgccaaagcgctggcgctgctcgcgaccctgtatcaactgtattgcccacagccggagaaccgcgatgaccattgactggcagcacttcacgccgtattccgcgttgacgggcggggccattatcggcggcgcggtagcgctgctgctgttgttcaacggccggatcgccggtatcagtggcattaccggcggtttattgagcgcggccggccgggagcggggctggcgcgccgcatttattggcgggttgctgctctccccgtggctatatgctgccgctgcgacgttgccatccggtgagatctcggttggcagcggctggctggcggccgcagggctgttggtgggcttgggtactcgattgggcagcggttgcaccagcgggcacggcgtgtgcggtgtcgcgcggttggcgccgcgttcactggccgccacggcgttgtttatgctgctgggctttatgaccgtgtggctgatgcgccacacgttgggggggtgaaaatgcttaaaacgctgttggcgctgctgagcggcgtgattttcggtctggggttaattattgctggcatggccaatccggccaaggtgttggcgtttctcgacgttaccggccagtgggatccctcgttggcgctggtgatggctggggcaatcgcggtggcgacgccggccttcctgtgggcgcggcgacgcgagcggagcctgttgggcgagccgctgcagatcccggccgccgggcgtgtggatcgccgtttgttggcgggctgcgcgctgtttggcatcggctggggcatcgcggggatttgccccggcccggcctgggtgttggcgggggcggagatgcagcgggtgtggccgttcctgttggcgatgctggcgggtatggcgctgtatgaaattatcatgaggcggaggcgtacatgtcgatagccaaagcggtgttgcgcatcgcgcgcccgacagatcggttgcaagagattgccgcgctgtattgccgtgggctggggttcgaaaggctgggcgagtttgtcgatcatctgggctttgacggcattatgatcgggcatccgcagcatgcttaccatctggagtttacgcagcatcgtggggtgcaggttggacaagcgccgacgcaggatcacctgctggtgttttatctgccggatgagaacgaatggcgagccgcgtgtgagcgtatgcgggcggcggggttcttggcggtcgccgcctataacccctattgggatcgggcggggcaaacctttgaagatcctgatggctaccgggtggtattgcaacaccaggcctggcaggcataaaaaaaccggcgcatcgagcgccggtttgcgagataaaacggtttatccgtcaggcgctggtcgccggcttttgtgcgctcttggaatgggtattttccagcatgcggcgaatcggcacgatcagcacgataagcacggcggcgcagattagcaacgcgactgagcagcgggcgaacagatccggcagcatatccagttggtcggccttgacgtgaccgccgatcagaccggccgccaggttgcccagcgcactggcgcagaaccacagccccatcatctgaccgcgcattctctccggcgccagcagcgtcatggtggccagcccgatcgggctcaggcacagctcacccagcgtcagcatcaggatactgcccaccagccacatcggcgatacgccggtgccgccgttgctcagcacattctgcgcggccaacatcatcaggccgaaaccgccggcggcgcacaggatgccgatcacgaacttggtgatgctgctcggacgcacgttattgcgtgccagcgcaggccaggcccagctgaacaccggcgccagcaggatgatgaacagggcgttgatcgactggaaccacaccgccgggatctcgaagccgccaatcatgcgattggtgtaatcgttggcgaacaggttgaacgaggtcggtttttgctcaaacgccgaccagaagaacgcagcggagatcagcaggatgaagcacaccagcaggcgtgcgcgctctttgcggctcaggccggcaaaggcgaacagatagatgaagtacagggtgaccgacgcagcgatcacgtacaccagcatgctggccacttcgaccggattgatgacgatggtgccctgagcgatcagcacgatgacggccaccaggatgaccgccagcgccagcaaccaggcgccgacgccttttttcttcgctaccgggctgttccaggtggagtccaggcccacttcgcggtcatagcgtttcatcgccgggacggcgaacacccggaagatcaccagcgccaccagcatcccgataccgccgatgccgaagccccagtgccaaccgtgtgacttgatcagccaaccggagatcagcggagcgatgaacgagccgatgttgatgcccatgtagaacagcgagaaaccgccatcgcggcgcgcatcgccttttttgtacagcgtgccgaccatcaccgagatacaggtcttgaacaggccggaaccgagcacgatgaacatcaggccgatgaagaacaggttggtgcccatcaccgcggacagggcgatcgacaggtggccgagcgcgatcaggatcgaaccgtaccagacggccttgcgttggccgagccagttgtccgccagccagccgcccggcagtgccgccaggtacatgctgccggcgaagatgccgacgatcgccgacgcgttctcgcgcgcgagacccagaccgccgtcgtacacggtggcggccataaacaggatcagcagcggccggatgccgtagaacgagaaacgctcccacatttcggtgaagaacagagaacccagcggatagggatggccgaagaaggtccggctttctgacttattgacagaggattgcataacgatttcccaataaaaggcgctgcaaggctgcagcccgtactgtggtatgtatgtgtatttaataaaggcgatccgcccaatgcggattacccgacaaacaccgtggctgcaacgctgataaaccgtggaaagcgtgctgaccttttcttcacttggccgatgtttcacatctggcgtgatattatttaaccatttgataactggtcgttggttttgtctagtacctgtatcccattttttagacgaaaagtcgacaagcatctccttttctggtttttctgttggttgtgacaggaatatgattgacagcgggttttatgtgctgaaagttatttttttgttgataaacaaaatgttgagataagaaagttctgggtgggacgaaaattcgccggcccgaaggaggcattattaaaagtgggggaaatgcgccgttgatccggccaacggaggaagctggcgataaatgcagctattgttcttcctgcagcgtgtcttcccgcaaatagcccggccgccgccgcagacaccaccaggaataaccggcgttgaacagcaccactaaagcggtgacggcgaagaccgcgcgaaaaccgtagccggcggagaccgcagcgccgagcagcggaccgctgacgttgccgacgtcgcggaacgattggttgtagctgaagattcggccggctacctgattggtgcagttgtaaatcaacagcgtctgtaccgccggcagcagcgctccgtcggccgcccccagcagaaaacgcagcaccccgagctgccacggcgtttgcacgaacgccatcgggatcagcagcagcaccgagacgatcagcataaacaccagaatgcgctccgggccgatgcgatcgcccagcttgcccaaccgtggggcgctcatcaaggccgcgacgccgggcaccgaggcaatcagcccgctgataaacgccaggttatgggtggcgccggccagatcgcgcacatacagcgtcaggatcggtgcgatcgagccggtggcgatctggatgatcatggtggtcacgaacaggctgagcaccagcttcgggttcttcagcgaggcgaacacctgttttgcgtgcagcatgtcgcgcttttgcaccggggtgaattgctctttgacatacagcagcgtcagcacgaagcagacgaacagcaccgcggcggtgatataaaacaccgggcgcagcccgtacagatcggccagcaaaccgccgatcagcgggccgaccagcgcgccgccgacgccgccggttgacagggtgcccagcgcccagccgctgcggttgcgcggcacctgggtggcgatcagcgcgttggcgttggggatgaacccgccgagcagccccagcaccgcgcgcagcgcgagaaactgccagaccgtttgcgccatgcccatcagcaccatgacgatcgccatgcccagggcggagcgcagcagcatcagtttacggccgcgtcggtcggccagggcgccccaaaacggcgcggcgatagcggaaaacaggaaggtgatgctgaacagcagaccggaccacatgttgagcgcctgatggccggttacgcccagcgtctctacgtacagcggaagaaacggcatcaccaggctgaaggcggcgccggtgagaaaacacccgacccaggcgacgaaaaggttgcgtttccagttaacgggttctgctgccgaagccataaatgtccactgtagaagggtgacgcgctttgccggtggcgagatgaaggggcaaaacgtgaaagttagcctgataagtatgcgccgcctgcgtggcaacggcaaaccagaggacggaaatagggcgaaaaatgaaataaagttttaaaaatggcgtttaaaccttattccgcgcttagcgcgcggaatttacagcgttttataagccggccagcgcctcgaaaccggcggcggtggtggtcgcgctaaagtcgatgacctcgtagtgggccacggcgttgaatggatcttcggccaggatggcgtccagctgcgcacgctcaatgcccttggccaggatcacgccgccggtgcggggattcttgcggccggaagcgacgaaggtgccgtcctgaaaatatttcttaagccaggcgatgtgcccgtcaaggtggctgtcgacgtcggcgatcgggcgatggtaggtcaggctgacaatgtacatagcggctcctggggtgtcggcaaaggcattaccatcccaccctcgccggcgattctcaagaggcacgcaataaaaaacccgccgacggcgggttggtttaatcagtaaagcgaaggctcgccttccggacgggtcttgaagcggcgatgcagccacatgtattggtccggcgccatcaggatctctttttccaccactttattcatgaaggcggcggcgtcgagttcattatccagcgggaagttttccaccgccggctgcatgatcagctcataccctttgccgtccggcaggcgacgcggggtgaacggaatgatcgccggtttacccattcgcaccagcacatagctgccggtggtggtggcggctttgtccacggcgaacagcggcacgaaaacgctgctgcgcgggccgtagtcgtgatccggcgcataccagatgatatcgccctgtttcagggcacggatcatgcctttgacgtccttgcgatccagcatcgacttgttggaacgcatgcgtccccaagtttgcagccagtccatcagcttgttgtcgtgcgggcggtaaacgccgatgcccgggttgtgaatgccgaagatgcgcgcgcccagctccagcgtcaaaaagtgcaggccaatcagcagcacgccctgctggttgtcgcgcgctttttggatatgctccaggccgctgaccttgaaccagcgctcgatgcgccagttgggccagaaccacgccatgccggtttcaaacagccccatgccgaccgattcgaaattctttaccaccagcgcatcgcgttcggcctgcggcatgtcgggaaaacagagctcgaggttgcgttgggcgatagcgacgcgccgcttgagaaagcgcatggaaaatcgcccaatcgaggtgccgagccagtagatgacggggtaaggcagcaacaccagcagatacagcaagccgatgccgacccaggtcagccagtagcgcgggtgcaataaggagcgattgaaagtaggaacttgagtcatgggttctctgtttgaatacggttgtttaagtgtaatgacagcgtcatcgcacggtctggcagccgggtgaactcggcggcaaggttcgtttctgccgtttgtttgcgactattgtggcatttttctggcgatccgggaaaacacaacgcattaaaatcccttttggggcgttaaatatgcatcgaatgccgaatttttccacaatctttcctgccaaagataatggcgatattattgtcggtaattatttagagggtaaatatgttggcatcatggatcagtgcggggctgctggtgttgggtgcggcggtcggcagcgtcggcgcacatctgcagatgaacgcgatattggcgctggccggcgtaatgatggcgctcggtatggtggcctccgcgtttaccgaaggcggcgggcgctgaacggggcgctgcgccagggctgcgcggcggtggtttttcgggtatgatgtgcgccgcgcgtgggcctgctggctgcgcgcggtaatcagtcacctcccgaaagacaggaaagtacaccatgccagtgttacataaccgaatttctaatgaggaactgaaggcgcgcatgctggcggaaaccgagccgcgcaccacagtttctttttacaaatacttctccatcgacgatcccaaggcgtttcgcgacagcctgtacgttcagtttgaaaaactgaaggtgtttggccgcatctacgtggcgaaagagggcatcaacgcgcagatcagcgtgcctcagcataacttcgacgcgttcaaagccgcgctgttcgcctcgcacccggcgctggatcaggtacgcctgaatatcgcgctcgaagacgacggcaaatccttctgggtgctgcgcctcaaggtgcgtgagcgtatcgtggccgacggcatcgatgacgaaagtttcgatccgagcaacgtcggcgagtatctgcaggccgagcgcgtcaatcagatgatcgacgatccgaatacggtatttgtcgatatgcgcaaccactatgagtacgaagtcggccacttcgaaaacgccatcgaggtgccgtcggataccttccgcgatcagttgccgatggcggtggagatgctgcaggacagcaaagacaagaatatcgtcatgtactgtaccggcggcattcgctgtgaaaaagccagcgcctatatgctgcacaacggttttaaaaacatctaccacgtggaaggcgggatcatcgaatacacccgcaaagcgaaagaacaggggttgccgctgaagtttatcggcaaaaacttcgtgttcgatgagcgcatgggcgagcgcatctccgacgatgtgatcgccaactgccaccagtgcggagcgccgtgcgacactcataccaactgcaagaacgacggctgccatctgctgttcattcagtgcccgagctgcgccgccaagtttgaaggatgctgcagcgagatttgccgcgaagagctgaagctgccgcgcgaagagcagcgcgcgcgccgtgccggccgtgaaaatggcgtcaagatcttcaataagtcgaaaggcttgctgcagaccacgatgcacattccggcaccggaagaagaaggcccagcccgctgagcctgaggaaatgagaagcccggccgccaagccgggcttttttttatttctcgcgcacgccttctacggagatgatcagctcaacgtcttgcgacgccgggcccagatcggtggtgatgccgaaatctttcagcttgatcttgccgttggcttcaaagccggcgcggtagccgccccacggatcgttgccctggccaatcagtttggcatcgagcgtaaccggtttggtgacgccgttcagcgtcaggttgccgaccaccgcataaccgtcgccgtttttcttcacttcggtggattcaaacttggcctgcttgttcttctccacgttgaggaattcggcgctgcgcaggtgcttgtcgcgctcggcatggttggtgtcgacgctggcggtattgatggtcacgttgaccttgtccttcgaaggatctttttcgtcgaaggtgaagccgccgtcgaagtctttaaagctgccgtacagccagctgtagcccagatgctggatgcggaactcgataaaggcgtgctggccctgtttgtcgatcttgtagtccgccgccagtgcggaaccggcgctcagcagcagggcgcctgcggtcaggcccaatacggtctttttcaacatagcaatctccataaatccaaaggttaatcggcgctgctacccagcatccgtttcaaagtgacatcacgatcgataaagtgatgtttaagcgcggccagcccgtgcagtaccgagagcactaccacggcccaggccaggtaaaggtgtatggcgccggcggtgtcggcctgttccgccatgccggtcacggtggcgggcacgttgaaccagccgaacacgctgatcggttgaccgtcggcggtggagatcagatagccgctgatcagaatgccgaacagcacgacgtacagcgccagatgcgcgaggatggcgctgacgcgagtgaggcggccatagctggccagaggtttgggcggcggtgagacaaagcgccagatcacgcggatcaccatcacgatgaacagcagcgtgccgatgcttttgtggatctccggcgcctggtgataccagacgtcgtaatagcccagcgtgaccatccacaggccgagcgcgaacatgccgtacaccgtcaacgccaccagccagtggatcaacactgacacatggccgaaacgatcggcggtatttttccagagcatcctgtttccttcgattaccgattggctggctgcaataattaaactttaggaaacataaaatcaataataaatttaactatgttacttcttagaaatattagtcagtgaatttgtttgagatgttcgtgaaccttcagataaatcgttgaagatgatattgtttctctcgcccggtgattgtgctagttgttgaaaattaggcttattatctattaatgtcagcttttgtcattttacgtaaacctcgcgtgagttgcccggtgagattatttgttggcaaaggttatgcctattttttgcggcgcagagcagggcggaaagattaacgttgtcgaacggtttcgctaaatcccctgcggtgcagcggcggattttgctaccattagcgccaagagacggccccatgaggccggttaacccagtgaaataacaaggaaacgtcatgggccgaacccgcgtgaccgacagcagcctgcgtctggccgtcctgctggcgatgttggtgatcattttggccggggtgaaagccgccgccgacatcgtggtgccgtttttgctggcggtatttctcgctatggtgttgaacccgctggtggcgatgctggaacgcaagcgggtgccgcgtatcgtcggggtgacgctgctgctgacggcggtgatcgtggtcgtgatgctgtttatcggcatgctgggtgcttcgctgaacgaattcgcccgctcgctgccgcagtaccgcggcatgatgatcgagaagctgcgcgagctgcagcattacgccgatcgcttcaatatcagcctctccagcgaagcgatgctgcagtatgtcgatcccagcgcggcgatgaatctggtcacccgcatgctggggcacctgtctggcgccatgaccaacgtcttgctattgagatatgatatacactattgaaaatgctcaatcggggtgaatagtgaaatcatatttatacagtagaatcagtacattacaacaatcagaaggttttggtatccaacgccagatcaacacagttactgactttctgtcttttgctgagattgatagccgtcttggtttctctctcgatccaagtaactatgaaatcttagaatcggacttgggtaaatcggcctttactgggagaaactggaaaccctctagtagccttggccgcttctatgaatctgtcatgagaagggagattatagagggaattctcatcgtagaaaatattgaccgacttacgcggcagtctaattatgaagctgcacgtaaactgattaacttgattactaatggtattactattattgaagttgaaagtggcatgtgcttcagtactaaaataccggaatcactttcaatattgaatatgagcatatcgcgtgctcatggtgaatcactacgcaagtctcgaatgataaagaaatcgtgggataacaaaaaagctaaattacttgaacaaggaatcgcacctagtaagaaagtaccgcgttggttaaaggtgatagacggtgcatatgtagttgatgaagtacttgcaacgttgtttagggaagcgtttgtactgtacgacaagggacacgggaatgctgcaattgttgcacgtttcaatagtgaaggaagactcaataatggtaagcaatggacaaccattaccatgcatcgtgtacttcgcgataaacggcttaatggaataatgacattcggtaaaaacactgatcgagataatgaagagctacatgtgtttccggtagtggttgagaatgagttattcaatcgagtacaagaaaaaatcaatggtaagactaagtatgatagaactacaaagagtcaaaaaaacctatttaaaggaatgttgaaatgttcattgtgtaaacaagcaatactaacaactactgatggttctcgtaatacacacgcaagatgtataggcagacgtgaccataaaaattgtactgcacgtggctttatatacataccatttgagcgtggtttgctccagtacatacgcggtataaattggagttctatttacaatagtggtgttgataatagtcaggcaattgagaactgtaatgtaaagattgcaactattgattttgaaattaatgaactatccgaagaacttaaaattgctgatgatgatgtagtactagcactggtaagaactatcaataataagaagaagactcgtaaaagtttaagtgatgaacttgaattgcttactcgggagttgccaaaagtagatttcgataatattaaagataacctacatgatcctagtaatgttaaagaaagacagcatgttaatattgaactgcaaaaagtagttaaagagataagagtacttagaatgagtgactatatttttgctaatataagttattatacatgtactgtgatacatatgattgcattggatatgaaaggcaacctgataactacttcttcaattgacgaaaatttaaggttccattccgactttattgaatgggatttgttgaacaataaaatggaagtgatcaatacctcatggactgatgttcaccaaatcctatgggatctttggagtgacattttcgatgaagcatttgagcaagcgaaagggatgtttgacggaaagcattgaaaatgagtataggaagcttgcagaggtgtttaaaggcaaaagacgaaccaattcgaaggatcagaacgcctcacagagcgttatacgcagcttgaagaaataaatctgaaaaaacgccaaaatccggctattatataggtagtcggattttttttcgtctgtcggtgaaacgacgagttattatgtggtataatataggcatctccactaaataagtgaaagtaacacttatggggataccacatgaaacaattctttaaagacacaatcatcttcggtattgggctatcaatggcagtacttacacttgcacatccaatactaattctatggttcattctcgttatatgggcattacgaggtgaacatgaaaaagcttaatctaataactgcatgtggattggtaaaaatactattccccgatctaccagagcatttagtactggtaaatgagattctacgattcttgcaagacaacaatttagaactgaccgaaggcattgaacaattcaacagtgtcttttggcctacgcttttcacgctttatgatgtgaagataataaatacagataatgaaagtacaattgcatttgtattccataatgaaaagcttggaattgcatttggtaacgtatttcattcaatttaataaatagtttaaatctccagagacaaagttaccgcaagtgacattgcggttcttttttgcaattaaaaaataataaaaggtgcacaaaaatgaaagaaaaaaagaacacgtcattcggtattagattgaatgaccgacaagttgaagtactggatggtctgattaacgatggaaaagcaaaaactagatcagcagcagtacaatatattatcaatcaatacattattcttggaggtgacaagaagtagtagtaggcagtaaaggggatcacacggacgttgcgatccaaatataaatggaatttgaaaatgggaaaacataaagaactagtagccgggattggcacgaatgacctgaaagatattaaaaaacaagaaaagatgggcttaacacctgaaattagagagaaatgctaccaagcgtggaagagtcgcctagaagcagaaacagtcgagaaaagagctactgtcagtactgaatggctcacgtacagtaaattcgctagctggtggcttgatactcgcatagaaggctggtgcatcgataaagattggctagtcgccggtaataaggaatatcatcctgataaatgcgtttggataccgaacaagattaacagcctgatgaatgacggtggtaagaataacggattaccgaagggtgtcagtatacaacaacagaaatataaagacgtcgtttataagggctatcaagcacggtacatggttggtggtgttcgtaaatctaaatacttcaaaaatcctcatgatgcccatcgccaatggcagctatggaaaattcaggaaatcgataatgtgatcaacgagttcagtactgatacccgacttgatcaacgagttatcacgcgtcttattgaagtcagaaacgatatcaaatgcgattacaataacaattttgaaacacaataaaagaagccccttcgctcggggcttatctaagactaactactactaaactatttatagggatgcaaaatgctaaaatatatatctgccgattgtggcagtgggaaaactcatgcactaatttcaatcgcaaaaaggtcaaatgatagatttattatcgtgcaaagtactttacagttgatcgaacaaactacaaaagaactaggtgctattgctacggcgattacgtcatcgaatcatagtaatgttatcaatgcaacgattgaatttttaatgaagcctactcaccgagtactagtactttctgagaaagcatttcttggaattagcgacctatctctattaagggactggaagatatttcttgatgatgtagtaaacttccatgcttataacgtcatcaacactgagaaaaagtacgaagttgagaatgaactttttcgtgactttgaagaagtatcagagcagtacttgacagctaaaccagtacttgaatttagcgatgatctactaaagcaaatgtctagctcattcgactttgttggaacttatgatcatttcgtaatgaatagtagtttcttcaacaaaattggtaaagctggtaatattgatgtgtattcaaatgattgcaaacaactaactaccttagcttgggtgaacatctccaagtacaaggatctagatgttactttcatggctaatctgttcgaagaaactctaatctacaaaggcaacaaagaactattcgagaaagttgatttagatggcttacgtgagcgtgtgaagacagtacgggaacgtgtgaaggtttactacttctcagagaatcaacgcctcacaaagtcgttcagggactctcatggcgataagttacaagcagtgtatgactatataaatgctaatgtaaaacagccttactactacactactaataacagtactggcaaagtgctaaatggtgtttatatcaagcctgtaagccgtggtatgaatagttttcaagattacagtacttgcgtatggcttgcatcaatgaagccgtcaccagtcgaagcaaagcagttagaattgatgtttaagatcactggtgaagagattacatatgctcgtgagttagaaaatctctatcagttctgtaatcgtagtagtctaagaaagtatgacagtactgaacaagtagtagtctacgtgttcgacaaggaacaggcacgctttctaagtgacgatatcgagtacatcgatgttggtattgatgaagtacagaagtttgtaccgctagatcttggaagtactaaaacgaaacgcctttatcgtactttgaaaaagaatctttcagaagattcttttctaacgtggttgcgtagtgatactaacaaagatttatcagatcgtgaacgtgagcatttcagaactcagtactacaagcgaatgtctaaatcaccaacatagggtgtccattttttacctataaggtttaaggtattttgtggacattcaatcatgaaatgagttgaacaagtggatttggagtgctctgagcacgacaaaacacgcagggaaacgaaataatgcggttgcttgcaactgcattgatcaagtaatgatattattaattacgcccattgctcacaagttcgcaatagtcggcttgtttttcttagttgcacttgctccgctgcgtttacttgcgaacaaaggcattacttttttaagtagttaatgggtattttaacggccttgttagtaactgacgcgggacaagcccttgtcgggaatcgggctgttaaagcccttaaataaaaatacccaaagtagccgccgggcagtactaacccgatctaattgaacagccctatgatggtgattttaactaactctgaaaaagttagtaaatttctgctttttaaaattttcatagcaatcatcaagtgtagctaaatctttcaaaaaatcttcatattgtgatttaaattgtgttaacgtaaactcaaaatcctgtctactcacgcaaataagattgtatatgcatgaacgagaataattataagcattggcagcagaagcatttaaatttctgagtgacttaatgactgcatttatcttttcagggttcaaaacagtaatagaccagcgttcaattaatacaagttcatcactcagtccatcaactaataaaatgttacctgaatgttgtttggatagtttctcatgtctatcttgcatttcttgatcagcaaaaataagattggaatcaagagcatttagatactcaagtgctgaatgaatttcgcttagatatcggtttctttcgcgataatgattatcaatagctgataatatattctctgctttatcgaaacctttagtatgtgaacgttgtgaaaaccattgtttagcatttaccgccgcataaacagctgcaccggccatcgtccaatctgctattgtacctgtaatatcataccaagccatataagctccttaatcaataaacaaatctgaatagtgtttaattattttgttgtgtgatgcacgaaggacactgtactgtttactcaattttatatcattttcaaaactattatttaatcttaaacaagtctcgttagatccaatagataaagcagcttcgatagcataggctaactttaaatgctccgatagtataatttcaaaatcatctgtgtttttcggttttaaaccccatagctccattctttccatttcatttcgcaaagatatggtatttttcctataggtagattctctatcatgcaagttactccagcgttttgcaaagctaacagtatcaccctgaatatctggatcggtgttgataatgttctttacttcagcgtatagataaaaggcttcctgttgtaatctacaaaaactatctataatttcatcagcgaacttgaatttacgctcatttaatttaggtgataaccagtctttagcattaaaggctgcataaacggcagccccagccatgagtatattggcacccgcactaatccaatctgttaatgaacctagttccattttcttatccgtgctgtagtagagagtacttatcaatagcagtactacaagagtgagtagtactatagttagtcctatgagtaatcgatttgtccatttcatctaacgtacttccacacactagccggaattttatcgtataacttacccatcgtgatttctgctagtcgatggtcagaagctgcatagaaagtctctaactcattattagaaagttcatacttgttcttatcaatgactttttctagtgtttcaatactaatacaccggcgaagttgcattatccaatcttgtttggtcatacaggctctgtgctgtgggaaggaagatacaagtactgattctacaccaaggctgcgttgttggcgatacagaccagcgagtgataacattcaaaatgtcccgatcattgggtcatataatagattaattactaaaatgatcgggacaaagtgagtgttttttaatcattaatgacttgtctactactttatgcacgggacaaaccatatgaaggaaaatggagaggtaaaactttcctctccaaataagttacttaccgttcattatagtgattaagttatgagtgatgctctagttcagtaattttgtctaggagggtcgtatattcatcaaagccggttatatcagtatcttttacgctttccgtcatgctttcaagtatattccttgagagctgatagattaaacgtaataagctttctgacgtgacacctgctgaactgttacctttagtataggtgatacttttgttgtcgagaaataaaatgtgtcccaatttacctgttttaatgaatttatcttcgcatatataaaactcttcattttctgattttattttattgtattcttcaagtagtaatcttttaagagtagaatcaccaagcataaaaacttgatcggattcaaatctaagataatggaagttttttacattgccactatttgttacaacacgcggtgcataactaaagttcatggcgttatgtttaatgtagttgttcagggtgaaaataatgtcgtagtcgccattaattaagaatttaatggatttatcaaatgcatcattgcaacgccgtgtatattcttctttaaattcttcttttgaacttaataaaattgaaagttgatagttttcaaataatacaagcttgccatgttcataacctttttcgcctatattttttctaaatccatcaaatctcggggctttcggttcaggaagaacagtcccgatgattgagtaaattacgcagggaagatagtattctgccagagatgccgcattgttaataatagcatcaaggtagtaatgacaatctttctctaaataatgattttctcgcggccgtgctaatagtgtattaaattcctcgcaaaaatatatcaacttattgaactgatacttcagagatgactcgtaaatagttttagcgggaattgttccagttcgaggttcatattgaggtaaaatcatgctcatccttattagtttaattgaaattaaacaactcaataatatctttatctagcttggatctaaagtgttcaatatttctatactgggcacttagttcttctctggccttattatagtttgctatttcctctctagataaaacactatataacgctaggcataggtcataaaattttaccatatcttcaagatggttatcaaagccaacctgctgacttatactaaatctagagcatgattgtaatctatcctgtagtgacattatgttatatatgttgttgttcattcttgttttgacactattgaatatttcatttgttctgactaaatcaagcattaaaaaataaagacgatgcgtttccaagaatgaaatgtcatagtctgccatcaatttagttacatgctcatatcctgctgagttatgtttgtctttaatccagtttttggcgttgattgcggcgtaaacggccgaaaaggccataagtatatttgcaatagcagccgcccagtttgcccataccccccaatcgtttaacttgatgtattgggctgcataaatatttgcgaatgcaaaggctagtaatgctaccaaaatgcatagaagtactttaacgatgttatcaactgtcattatatcctacctgattgtggaacttgtattgtccgtactattagcagttgataatatagtactattgatccgggttgttagatagtgggcgtcaccctcgtagtttatgtctggcaactcggatcaacccagcctcctgtaagccttaccacgcgatttaaatcacgataccaataacttgataggcttttgcacgcaacgcctattaagcccgtacacgcacgatttaacatttgatgtcggttgtaacgatcgaaagtgcggttatcgatcgttaatgttgatcaaagtgctcgtggcgagatataacaacaccaaggaatcggggagacgtgaacaacaactagaattaccccagcccgcctagtgcgggtttttttatgccctaaataccaaaaggagggcaatatgatcctatcaacaacacagacatttctaatacagaacgcattgtatcaactaattacattcggtgatattcgtgtagagacacatctgtatttcaataatacatgggaagtactaataagtggtgatgcatttaaagtacttaaattcaatcgaacactcacggcattggatgaacctgaactattccagtactcaacactaatagacgccaagatattagattacatcattacccaacaccacgcattggagaacctactatgctattacagtactgcacattaaatacaatgactactacctaacaataaacagtactaaactcacagccagatataaatacataacaatacacgatgggtactatgcaacgattggaagcaggatcgaatatgactatctaaattacacaggcaccgaacgcaaacacattcaagtactgcaatcgatgatagacacagtgacagtactgttcaaggaagcatagtctagtactgacataattaagtactgaacttcatcgatcgtcgtcgaaaagtattgattttaaaataaaaaaggtactaccaatgagaaccattctcaagtgtagtttcgccccgccttgttttaaaaatatatcgacttttaacccttattccgtaccgcaaggaaaataaatgctctctttacaccaactagctagagaatatggctatgacgaatcatcattacgtcagtggaaacaaaaaggaatgccacacggcaaagatattcctgatacagaaacacgaaattggattattgaaaatgtcattaagccattacgtgaaaatacaagtactaaagaacaaattgaaaaagaacgtctgcgaaaattaaccgcaacagccaacataaaagaacttgatgaagccgagtgaagaggggaattgattaacgctgcaattgttgaatcagaacttgcaaagtactttcaccagttcaaaacagtcatgcgtagtattccatcaagcgaatatttaaaactatttgaaagcaaggatgctatcacaatgaagaataatttaaaggacgtaatagataatgcactcagagaaattggatctcttgaaattcaagaagatctaccagaaaacgataaaaaaaatactacctccagaaagaataaaaccaagtaaatttgcagaagataatctagtatttccagatggccgcctagcaggacaaaaactcagattatttgaattccagcgtcaagtactagatacaatcgttgagcctaatattcatcgcatcgtcatgatgtcatcggcccagctgctgaaatctacagtaatgcttgcagccatgaattacttcattgtgaacgaccctgctaatatggcttatggttcacaaagtacggccagtactcagaaattcaaaacaggtaaatggcaacctagtattgatcagtcagtactgaaagattatgtgacactcaaatcagataagaatgccgctaacaatgctaatacacaacagaatatcgacggtactaatacctatatcatcaacttgaatgccccttccactttacgcggaataactactaaaagaatatttttgggatagggatgataattaaactaattaaatctggtattggattatttcagaaaaaagaacagagtaaaaatgagttagaagctcagaatagccacgaacagaatcagatcactcttgaggaaactcgtaagggcttcacgtggcggcaggcacttgggtatgtattgactttcatcgttgcatggaattacgtgattcttccagtactgttggtatgtggtgtagtactcccgccaatacctcttgatgatgtatggcgggtactggtaatattaattggtggcagttaattattatcgatgaacatattatctacatgggatagcacattacgtaaccaaaagggtcttcgcccaaatgagtgaaggaccaggggagtaccatccgaaatcatttttctatagtcatcgtctgttaatagttcagtattgataataatcatgatatggttatcttcttcaaaattagatggataacttagaccaagagaactcattagctcgtctggtgatatatttctattctttatacgctgaactaaccccggatgatggctaataatataagtgactattgcaatagcgacttgctccgtttcggatttcctctccgcctgagaggccgaaattaagctcatgaagccaaatgctctttctgcatctcttagactagcttcatttctagataaaagatgcgaaagcatatggcatgcaacttgaaatgaaccattattaccaaatctagtattagatagatgttcgcagtacttccctacagcagctttattagttagagaaactggttctttaggtaaggtgaaccagtgatgtataaatttacttaaatacagtttggcatcgatctcgccataccttctcactataactttttgaaattgctctctattcattgatagtataaaaacaaagttattagttgagaaaacatgttttattttttctaatatttcaagtgagaaatcaggcctcgctctatctaattcatctattataaagactacttttttattttcggctactttttgtaatgtttccttaaagtgggctagggttagttcgtctttttcagcattttttatcttgtcctcaatgaatttatctatagggtcagataatccatctgaaatactatcccctgcactctcaatggctgtaccatttactaggcctgccgtggcaatacttatgcctactttagctgatattcctagaaggctttttccaacggcctttgctccatcaataaagcgtttttgtagttcaggctcttttttttcgattaggctatatatttttgacgcaatagctaagaatgcatcttgttgataatcattctcgaaagcatcaaaataaattgcttttaaagtacttggttcttttttgttaaggctactttcccataaacggagaaacgtagtttttccgctaccccagccatcatcaattgcaaatactaaactttcatcttgtgagttaataatgatattttctaactgtgtagcaaaacgttgcctgttaaatatatcattttcatgtgtaaaaccgtggctataatctaattcacgagtggttagtcgcatttataatcctcccaataggtaaatggccacatgattatggtgatgttctggtaatatttttattcacactcccatatggtgttctgtacgccactacctgcgggtaggtgggggttcacgtttgcactgtgagtgtatgtagcttttgtcttgccgtactgttggcaagctgcattcgctgtcttctgtaggctatcgaggccgtaccatccatctgactgaatgctgactgttttaccatcgttgtactgcacttgagcacaaccagtgagaagtaaaaccagaagcaactttttcattcgtgatttcaccaatcccattttactgttgtgtttaagcctcgtaggttggtgtgctctgttcttgttgctttcagtactatctgtccagtttcacgatcgatgatatcaaaagactcgatttcggtctgacccatagtacctttggttctcatgttagttctcacataatcgaacctatctcgcggatagttttcttcgaattgctcttctgtcatttcatcattcccagtagagttagtagccatagttatcttagggtaatgaaactaatgttacaacatgattgctaattgtacatcttattgcaaaatgtgtaatctggggagggtatcccatcaagaggacttacacatggcaaaaggtaaagatcaacacgtgacgccccatgctgatggatggcaagttaaaggggagggtaacagccgtgcaacggttgttactaacactaagaaagaagcaattgatgctgcccgagtaattgcacgtaatcaagaaagtgagttagtgatccataatcgggatggaaagatttctaactctgattcacatggacacgacccatatccacctaaagatactaagtgactgaaaaggagccgatttggctccttttcattgagttcgcactcgggatgagattttcaaggtgatcgcgttactgctttctggtttctaacaaccggcggtatgtgctttttactgtcttttattgactaacatcttcctgctgatgatgaccgtggtgtttatgctgttcgaagtgcagctgctgccttacaagctgcagcaggcgctggataagccgaacgaggggctcgccgcgatgcggcgggcgctggacggcgtgacgcgctatctggtgatcaaaaccatcatcagcctggccaccggggtgatcgtctggatcttcctggcggcggtcggcgtgcgttttgcctttatctggggctgctggcgtttctgctcaactatattcccaatatcggctcggtgttggccgccattccgccgctgattcaggcgctgctgttcaacggattgggggatgcgctggtggtggcgggcggctttatcgctgtcaacatggtgatcggcaatatcctcgaaccgcgggtgatggggcgcgggctgggggtgtcgacgctggtggtgttcctgtcgctgatcttctggggctggctgctcggcccggtgggcatgttgctgtcggtgccgctgacgatcgtggcgcgcatcgcgctggagaccaccgagggcggctatcggctggcggttatcctggggggcggccgcccgccgcgccagcctccggcggcgccggagtgaggcgagttttattgccacgttggggcgcgtgttgttaaggcgttttgaataggccacccaatggtggcttgacgcttctactgttagtgcatactgagaacattggctattcagcaaaaaaactacaaccacttaaaccactttacataggcgacacaaacgacaatggcccagatgagggtgagataaaaaccaaagtttgggaacactgaaacaaaaatgaccccgccgaccataatgagtacgatagggattaggtaagcgaatgagttacccagccattcaatcaaccacttcattttgtgagcacccaaagttcagaaagattttctattttactcctaaagactatatgggtaacaacaggaatatcacttcggcaagttagtggcatccaagggttcgtaaaatttatctttatccatataattttcaatatatataatgcggtagtgattaatgacaggaattacggatgatatagctagtgaaatacttttaagagaacagtgataactgttgtacataccaagaaaagcggtagagtacataaatgtaccaagcataaggatatgtgcatgttgataatgaggatgagttacaacgatctttcaaaaaacggaggagaagcgaagctccacgtctatgggctaggtactttccccgtttttctggtaggcagccgtacacaaatgatcccaactgtacctacattgagaacagtgcaatacctgttggtcgttattgggtggttgacagaccgagaggtagtctagccaatcaagtccgttcgtgggtacttgaccagtacacaggaaacgatcatagcgactggttagctctgttcagtgctcaaacaatgagtgacagcatgtttgtaaataagatcgcacgtggtagttttagattgcatccgctcagacccgatggccgcggttatagtgaagggtgcattacgtttgtgagtcgtctggagttttacaaggtccgtcgcttcatccttggaatgaagcttattagagttcctggggcacgcagtacgttgatgacctatggttttgttgatgtgcaaggggagagcaagtttgaaaaatgcatcgctcgttaagaatataatactgtatattgcatgtttcattactgctttctgtttctctcgccatgggatgccactgtatggcttaacgtcactcatcatcgatacctctcaacaactctttggcaggtatcaaacaggtttctatgaaatggacgcagatccactaacattcagcacactgatattcactgtggctctctatgccttggttatattcggtttggtaaagatggcattaagacaattcagataaatacagaatgtccgatgtgttaataaaagggcatcttaccactaataagttagtattaccggaaaagtcgtcttttcctccattagattttatttattggaagccccattgaataatggttcatccatcgcaatcgtctccgatgctgccggagtgaggaagatttttccgctcacgccgggttgtgcggcatgctgcagcgccgctgcgtactgatgcaaaggataaatcgcggcgggtgggcgcagcgccagctggccgcgccgcagcagctggaacaactgataaaacgccatctgccattgcgccggcgccgcctgtgcgttccatttgcgcaggtggaacagcgaagcgcgcagctttaactcgtccaccacgcgccgccagtctacctggcggccgctcagcaggcccagcgccacaaaatcgccgccggagcgcaccgcccgcgccaattgcaatccgtcttctccaccgatgcagtcgatggccgcacgggcgccaaaattcgtcatttccaccagctgcggcgcttcgataacgcgccaggcgccggcggccagtaaagcctggcgatgagcggcgttgcgcaccacgaccgccagacgaatgccgcgcagcgccgtcagctgcgccagcagcaggctgacagcggagccgccgccgttgagcagcagtacgtcgccggcgttgagcggcagccattgcgtcaacagcacccagcaggtgagcgggttgatatagatttgcgctgcgccagcgtcgtcgatgtcgtccggcacccagatcacccgatcctcaggcagcgtgacgaaggtttgccaactgccgttacccgctaccgccagcgcgcgtcggccagttgaatgcccattctgcggattgacgatgatgcctacgccttcatatcccggcacctgcggcagggcgatgcggtgcgcgtattggccgtggatcgggatcagatcggaagggttgatcggggcatagcgcatctgcaataaccgctgcccggggcgcagcagcggtctgctcatctgctgcaattccagcacctgggtgggatcgccgaagcggctgaagctcaatcggggaaataacggcggcatggcttacatgacgaagaagaaatagacatccaacgccagcagcaccagccacagacaaaggtaaagcaccaggtgctcacgcacattgttgacgatagccgccagtattcggtttaacatttcagccgcctgaagagaaggacccttgattatagtccttttctcggcgtcttttacagcgcgccgcgcgtgagtgctggaagagcggcgataaaaaagcctgcgttatcgcaggcttgatgttataccgccagcagcgccagcggcgtcgaattggttggcgtgctcggtgggtagaaatagcgcagcacgttatacagcgagtagaactccagccggttgcgcgcgttgatcttctccgtgatgtgacgcttgtgcacgtacaccgtatgcgagctgatctgcagctttttcgcgatacggtagttgggcatttccgccatccaatatttcattaccgtcagttcttgcgggctgaacagggaacgctcttcgccgtcatcggccagcgccagcggattttcgcgcagcgtgcgtaaggtgagcggcagaatgcttttattgaacagaaaggcattatcggcaatgcgcattggcgcttcgctgtaaggataaggtgtatcgagatagataaacagcaaggcggactggctggcttccataaatgcctgcagctgtgcgtccgcttcgttatagcggcattggttgctgaggttcaccagaatgtggctcggctgaaagctggccaacagcggcgtagcgtattcaatgctgtggcagcacttgatcgtcgtaatcccactatcagcaaagtagctggctataccgacccgggtgaagcagcattcgtccacgacaagtagtttcatggtgacgtccttgttgaaagccgatggagcatatcttctgtaaaataggacttacactgcaagtgttcaattcggaaattcaaatgctgaatgcaagaaatttccgttatcagaatttttacttggtatttaaaagagttagcaggttaataaattgtaaccggcagatttcgctgtccagagcgcgacgggaacgtggacagcgaaatccttcgcttagctgaatcgcttcagaccaaagctggagaggtcaaccggcggcgctttgtcctgcgcgaacagcgcggcgatctcgcccagtgcgctggcgaacttgaagccgtggccgctcaatccgctgatgaccatcaggcgatcgcaatccggcagggtatcgataataaaatcttcgtcggggctcatatcataactgcaggcttcgccgtgtaaacatacgcctacacccggcaaaaattgccgcaggaaggagaaaacttccgtgccgtcgctggcgtagctgccgaagggtttgcgctgttcgggggcatccatcggctggccgccgtcgtgtttgcccactttcaggccatcgttatccgccgggaagccgtaatagtgcgtgccgtcctgcgcttcgacggtaaaggccgggaagcgattgttcacgctgtagcggccgtccgcctgatgccaggagaataccttgcgcaatggcgcgataggcagctgcggcaacagcgctttcacccaggtgcctgcggtgaccaccgcttttcgcgccgtgaaacgcccttcgccggtgacgatctcaacgccgccatcaatggggttcaccgcgctgaccgggcagttgaacagctggctgcagccggcctctttcgccagtttgatcaggctggcaaccgcctgttcggagcgcaggaagccggcgtctggctcgaagacgccgacgtaaccttccggcgcgcggaattccggccagcgttgagcgatctgttcggcgctgagggtttgcgcattcaggcgaaacttttgcccgctctgctgagcattgcgaatgaattcggagtgctgcggccccaggttgagtacgccgcacgactggaacagttcttcaccggattgctgaatcagcgcattccacagcgcctgcgcacgcagcaccagcggcacgtacttttcaccttcgccgtaagcgtgacgaatgatgcgggtatcgccgtgatggctgccgttgcggtgtggaggaatggcgctgtcgatcatcagcgctttcaagccggcccgggtagcgtaataccctgccgccgcgccgactgaaccgctgcccaccacgatcaaatcatattccacgtgcccaccctctctgatagcaattgcttatcgccccatgataaaaggttggcgagcgcaatgcactgattgaacggtgaaaggcaaagaaaaaggcgccgggaacggtcacggcgccttagggttaggggacgatgaatcaatgttttctgcgatcaagatcctggtaatccgtagcttcaatcttggcgatgccggcctctaaaatattgattaattgacgggcgacatctgtagtcagccaaagcgttcggtctacttgggcttcttcgggcgtttggtctagtgaagacaggtaatgaaggcgtatcatcatggcgtcgtaaacgtcgacagtactgatatcccaaccgacaagcgggtgcgtctgaattacttcatcatttctgtccataaagaccccttattgagtagtaactaccgtgagtgactaacgaggatcaatgcggctcatcatcatgagagcaattacagtatacgcatccgctttcaacggtggagagggttgtcaccgaaatttgcaaaataaatatttatttgaacaattattctacaaatttgtatgtgcagcagtggatgagcagagcgcagcgcgttattccgcgtcggcaggcggcgatgcgccatgcagacatttttccagctcttcggccaaatgggcgaaatgcttttgcgtttcggcatcgcgattctggctgtgcgattccagcttcaggctgtggatcagccgttggttggctttgtcatccaggctgaaggccagataagaaaaagccacttccagtacgttcaagcgccttttctgatcggctatcagcgccagcagttcgccaaacgtcattgcgtcttcggatttcaccttgtccggggccatgcttactcctttgcgttaaatacagcgctgaggcggattttgttccagagtaagggtaagcgatgaatgggcagggcgccagaaacaaaaaagccggagagcgacccccggcaaaaacagcattgcagtgttattctgcgctaaaccattcgtctgcgctttcccaggtttcctgaaggatttcctcgatcagatcccggtcggttttggcgccccccagcacggagagcccgttggcgccggcataacgtacgtgcacgacggcgtctggaaactggcggttgacccgcttgcccagttcaccggtcagcgcctcaatggcgcccgccggcagcggccgggttttatctatagtgacttcaacacgcataattgcccccgaagcgatttactgtttatttatacagttaaccgagtgcgggggcaagagggcgaagcaaaaatatcagtctttcagcgaccagttcagggtttcacccgccaagaaggggatcacggattcattgccgagggcgatctcttccggctgggtggttggcacgcgctgcagttcgatgaagtcttcgttgagcggcaggccatagaagcgcgggccgttgagcgaacagaaggcttcaaagtgttccaacgcgccgagttgttcgaacacggcggcgtaagccgggatggcattcggcgcgttgaagcagccggcgcagccacagctggactctttacggtgcttgaggtgcggcgcggagtcggtgccaaggaagaagcggtccgagccgctggccaccgcctgacgcagcgcctcctggtggacattgcgcttgaggatcggcaagcagaacaggtgagggcgaatgccaccgaccagcatgtggttgcggttgaacatcaggtgctgcggcgtgatggtggcgccgaggaaacgattgcctgcctgcacatattgcgccgcttccttggtggtgatgtgctcgaagacgatcttcagctcagggaaatgctggcgaatcggttccatcacctgttcgataaagcgcgcctcgcggtcgaagatatcgacggcgggatcggtcacttcgccgtggatcagcaaaggcatgccgattttttgcatctgttcgaacagcgggtaaataccagtcacgtcgctgacgccgtggctggagttggtggtggcgttggccggatacagcttggcggcagtaaacaccccttgctcgaagccgttgaccagttcactggccgccagggagttggtcaggtagcaggtcatcagcggagtgaagttgtgcccctgcgggaccgccgccagaatgcgatcgcggtaggcgtgcgcggcggccacggtcgttacgggcggaaccaggttcggcatcacgatcgcccggccaaatacctgactggtatagggcaccaccgttttcagcatttcatcgtcacgcaggtggatatgccagtcgtctgggcggcggattttcagaacttgaggttgtgcggtcatctagctaggctccggcggtcaaatacgtctaatgaaaagcgaataatgggtttattcacgccggggtgtaaggataagcggaaagtgccgcagatgcatctgtttgttggcgacaagttgaaatcaatagcgcggcgggcgcatagtaaccgggatttcaacgatgccgacgccaataccgtcgaccttcatcaagtggaaagggagaaagcaatggaagtacgcgttatcgccaccctgcaagcgaaagcgggatttgaagccgccgtcagcgaagcggtgcacgacattatcgagccgagccgccaggagttgggcaacctgcaatatgacttgcatcgcgatctggaaaagccgggtgttttcgtgttctttgagcgttgggccagcagcgaagcgctggataagcataatgagacggcgcattttcagcagttcgtcagccggcttgacggcaagttggatgttctggacatcaaaaaactgaagaagatcgcctgagtattttacaggcaagaaaaaacccgccgatggcgggtttttttaggggtgcagattaacttattcgttaaccggctgcggtttggtggccggcgcggttgcctggctcaccgccgaatggccgcctgcggagcctttgccttcgaagttgaaggaagggcgctgccagtcgctgtgcttgcgttcttccggtacataggctggtgccggcgctttggtcatcggtgcagtggcgatgtgtttgtacagcacgttctgcacggctttcaccggcgccggctgctgagcaaccactggcgcaggggctgtttccaccggagcggcttccacggccgccgccgtaggtgcagcttctaccactggcgtttctttcgctggcgtggcttctaccggcgcagtttcgaccacaggctcgtcctcgaccgacttagcttcaactacaggctctgcagcaacggtttcaactaccggctcggcttccactgccggggcagtctcttccactttcggctcttcaaccgcggcttccgccggcgccggggtttcctcggccgggatagcaacgacaggcgctacggctgcagcttcttccgttacggtgacggcggcagtttcaacggcggcttctggtgccggttcgttgacgctggccgcggcctgggtttcttccacggcaacgttgtgttgttcaaccgctgcggcgacaaccggtgcctgctctacggcttcggtctgcacttcggcttcttcaacctgagcgaccgggtagcttacccagactttgcccgatgccatttccggcgaagcgaaggcacccgccagcggcattggagattgcagcgggtaacgctcatcgcggtaacgacggcggcgctggccgctgacgcgcaggtgacgcggtgaacgacgggagcggcgcggcatgccttcgccgttgccgcggttttcaccctgggcatcgtcttccggctgtgcggcaacggtttccggcagcagcttgacgctatcgtcggcggtcggctgcacgtcttcggctttcgctaccggcgctttcggcgccaacagctcttccgctgcacgctgcagctcttcttcggcagacaggatacgcactttctgcgtcagcgtgcggcgctgacggcgctgcatgttctgctgctggcgttcttcctgctcttcgtcggtgctctcgaccgcttcaacgctttccagcgctttcacttcctgctgagcctgacgtttctcttcctgacggcgacgctggcgttcagcacgctgctcacgacgctgctgctgatcttcgcgcggcgctttagcgctttcttccgaagtggtttcctccgctaccggcgcgttctgctgctggttgcggcggttacgacgctgctcatcgcgggactcacgcgattcacggccttcacggttctcacgcggttcacggttgtcgcgctcgcgattgtcacggccttcaccgcgctctttacgctcgccgcgttcaggacgatcgccacgctcaccgcgctctttacggccggtgccttggcggcgctgaccgcgacgatcctgacgacggttttcaccgttgccttccgctttcggcgtttcggccggtttggcttcttcgacggcaggttgttcttcaccggcgaacaggctcttcagaccaccgaacaggcggcccaggaagccctgcttggcggcggccggcgctgcggctttcgccttggcggcggcagcgacaggtttggtcacggcgacgggctcttcagccggcggcggcgcatcggcggacagcgagaaggaagccagggccggttgctccggacgcttgcgttccatcggcgcatcttccagcgggcgctccatgtcttcttcgtgcagcttcggcagcaggtagctgagggtagaggtttcctcgcccttgcgcacgcgcagcaccgagtagtgcggggtttgcatctgatcgttcggcacgatgacggctttcacgccgccctggcgtttttcgatcgcgctgacggattcgcgcttttcgttcagcaggtacgaagcgacctgaaccggcacgatagcgtgaacttctttggtgttttccttcagcgcttcttcttcgatcaggcgcagaatggacagcgccagcgattcgttgtcgcgaatggtgccggtgccgttacagcgtgggcacacgtggtggctggactcgcccagcgacgggctgaggcgctgacgcgacatttccagcaggccgaagcgggagatgcggccgatttggatgcgcgcgcggtcttggcgcacggcgtcacgcaggcggttttccacttcgcgctggtggcgtaccggcgtcatgtcgatgaagtcgatgacgatcaggccgccgaggtcgcgcaggcgcagctggcgagcgatctcgtccgccgcttccaggttggtgttgaacgccgtctcttcgatgtcgccgccgcgggttgcgcgcgcggagttgatgtcgatggcggtcagcgcttcggtgctgtcgatgacgatcgagccgccggacggcaggcgcacttcgcgctggaaggcggattcgatctgcgattcgatctggtagtggctgaacaggggaatttcaccgctgtacagtttgattttgctgctgaaatccgggcgacccagcgcagcgatgtgctctttggccagatcgagaattttcgggttgtcgatcaggatttcgccgatgtccgggcgcaggtagtcgcggaaggcgcgcacgataacgttgctttcctggtggatcaggaacggcgcagggcggccttcggcggcttttttaatcgcttcccagtgcttcagacggaaggaaagatcccactgcagcgcgtcggcggatttgcctacgcccgcggtgcgaacgatcaggcccatgccgtccggcagctgcagcgaggagagcgcttctttcagctcggtgcgatcgtcaccctcgatgcggcgagaaataccgccggcgcgcgggttgttcggcatcaacaccagatagctgcccgccaggctgatgaaggtggtcaaggcggcgcctttgttgccacgttcttctttgtctacctgaacaatgacttcctggccttcgcgcagcacatctttgatgtttgggcgaccatgggaagagtaattgctaggaaagtattcgcgggcgatttctttaagggggaggaaaccatgtcgttctgcgccgtaatccacgaacgctgcttcaagacttggttcaatgcgggtgattttgcctttgtaaatattcgcttttttctgctcatgacccggactttcgatatccaaatcatacagccgctgtccatctacgagggcaacacgcaactcttcctgctgagttgcgttaatcaacattcttttcatcttaacttactcgttatttttacattatcgacaaagctgcgggcaaaataacctcatggccggagttaaaccgaaagccccgtgtcttctcgcaaagtcgtcaacctcacggttgtcgcctgcataggggcgcattatctcggtaagcctgcttttctttgtgaaagacagcacttttactaggggaatagcctctgatttacgtcgacagatctgattccatttgccggccaagctgcaacccgcagcccgctaattgtttgatttcgcattacgtcttacgccattgctgcgtttttgcgcgatcagacaaattttataattccaccgttttccctgtttaacgagaatcaacgcggaaagtgactgcattattccactgctgatgccgttatagcaaggtgacttttccttaactgcggaagaaatcgcaaacgttcaaatcggcttgctgccttattgtccgctggggtttcgcccgccgtcagagagacagttaagcacagaaaaagatgtggcgctattcacgcgctctatttagaatcccgcaccatgaaaacgaacaatccagcagtacaattcatcacgatttccgacgacgaagccggtcagagaatcgacaactttctgctcgctcgcctgaaaggcgtaccgaagagcatgatttatcgcatcgtgcgcaaaggcgaggtgcgggtcaataaagggcgcatcaaggttgaatacaaattggcggccggcgacgtggtgcgcgtgccgccggtgcgggtggccgagcgcgaagagacgccggtgtcggccaagctggataaggtggcggcgctggccgactgtattctgtatgaagacgaccacctgttgatcctcaacaagccttccggcaccgcggtgcacggcggcagcggcctgagcttcggcgtgatcgaagggctgcgtgcgctgcgcccggaagcccgcttcctcgagctggtgcatcggctcgatcgcgatacctccggcgtgctgttggtggccaagaagcgttccgctctgcgttcgctgcatgagcaactgcggctgaagggcatgcagaaggattatctggcgctggtgcgcggccagtggcaatcgcactgcaaggccgtacaggcgccgctgctgaaaaatattctgcaaagcggcgaacgtatcgtgcgcgtcaacagcgaaggcaagccttcggaaacccgcttcaaggtagaagagcgttacgaattcgccaccctggtgaaggccagcccgatcaccgggcgtactcaccagatccgcgtgcacactctgcatgccgggcacccgatcgcctttgacgatcgctatggcgaccgcgagttcgatcgtcaactggcgggcaccggcctgaagcggctgttcctgcacgctgcggcgctgcgctttgagcatccggccaccggcgaaacgatgcgcatcgaagcgccgatggacgaagaactgcgccactgcctgcaggtgctgcgccggcaggcggccaagtaatctgcgtcacaccagcgggttgatgccttcagcccgcaacatgtccaacagcgcgatcaacggcaggccgatcagggcgttcggatcccggccttccagcctgtcgaacagcgcgatccccaatccctcgctcttgaaactgcctgcgcagttcagcggttgctccagacgcacataggcggctatctccgcttcgcttagcgcgcgaaaatgcacgtgaaacggctcgcacaaggcttgcagctgcttgctgcggccgttgtacagcgccaggccggtatagaaagtcacggcctggccgctggcctgccgcagctgcgcgcgggcgttttcctcggtatggggcttgccggtaatgttgccatcgatcacgcagacctgatcggagccgatgatcagatgctcgggataggcgagggccaacgcctgagccttcgccgccgccaggcgcagcaccagcgcttcggcactttcgccgggcaagggggtttcatccacctccggcgcggcgcagtcgaacggcagctgcagcttctctagcagcatttttcgatagggggaagtggaggctaaaagcaatctctgcataatttttttcgcaaaccgtagcgtaaatgggtacggcattttaaactgtcggccgctgtggaagcgaatattggtgaaaggagccgttttacggcctttttctttgactctatgtcgttacaaagttaatatgcgcgccctatgcaaaaggtaaaattacccttgaccattgatgcggtacgtaccgctcagaaacgcctggactatgctggtgtctatgcgcctgagcaggttactcgtgttgccgactccgtggtcagtgtggacagtgatgtcgaggtgtcgttgtcgttcaatatcgacaatcaacgcctcgcggtgataacagggcatgcggacgtcacggtaacgttgatgtgccaacgctgtggagtcccgttcgaacatcaggttcacacaacatattgttttagcccggtcgtcaatgatgagcaggctgaggcattaccggaagcgtacgaaccgatcgaagttgacgagtttggcgaagtcgatctgttggcaatgattgaagacgaaattattctttcactgcctgtcgttccggtacatgaatctgaacactgtgaagtgtccgaagcggacatggtattcggccaactgcctcccgaggcggagaaaccgaatccgtttgccgtattagccagtttaaagcgtaagtaattgaggagtaaggtccatggccgtacaacagaataaaccaacccgttccaagcgtggcatgcgtcgttctcacgatgctctgaccacgactactctgtctgtagacaaagtatccggtgaaactcaccgtcgtcaccacatcactgccgacggtttctaccgcggtcgcaaggttatcggctaagtagcgataccttgactcgtctaaccctggcgttagatgcaatgggcggggacttcggtccctgcgtcacagtgcctgcttcgttgcaggcactggcctctaatttacagcttcatctcctgctggtcggcaatcccgacgtcatctctcccttgcttgcccacgccgatccggttcttctggagcgtctgcaagtcgtgcccgccgagtccgtgatcgccggcgacgccaaaccttcacaagcgatacgcgccagtcgcggcacgtcgatgcgcattgcgctcgaacagctcagcagcggcaacgcgcaggggtgcgtcagcgccggcaataccggtgcgctgatgggattggcgaagctgctggtcaagccgctggaaggcatcgagcgcccggcgctgatgacggcgatcccgaaccagcaacgcagcaaaaccgtggtgctggatctgggcgccaacgttgagtgcgacagcaccatgctggtgcagtttgccgtgatgggtgcggtgatggcggaagaggtgatcggcattgcgcaaccgcgggtggcgctgctgaatattggcgaagaagagaccaaaggcctggataatatccgcgaagcggccgctgtgctaaaaaatactccggcaatcaactatattggttacctggaaggaaacgaactgctcaccggcaagaccgacgtgttggtttgtgatggcttcgtgggcaacgtcaccctgaaaaccatggaaggggtggtcagggtgttcttatcgctgctgaaatcgtccggcgacggaaacaagcgagcgtggtggctgaaattgttgggccgttggttgcaaaaacgggtggttaagcggttcggccacctgaaccccgaccagtataatggcgcatgtctgttaggattgcgcagcaccgtagtcaagagccacggcgctgcgaaccctcacgcgtttgcagtcgcaatcgaacaggctgtgcaggcggtgcagcggcaagtcccggaaaggattgctgcgcgccttgaggctgtattacctaagagtgactgatcgtacatgtatacaaagattctcggtacggggagttatttgcccgtacaagtgcgcaccaatgctgatttggaaaaaatggtggatacctctgacgagtggatcgtcacgcgtaccggtatccgcgaacgtcgcatcgccgccgcggatgaaaccgttgcgacgatgagcttccaggccgctgaaaaagcgctggaaatggcaggtgtggctaaagaagacatcgggctgatcgtggtggcgaccaccacgaatacgcacgcgttcccgagcgcggcgtgcctggtgcaagacatgctgggtatcaaagactgcgcggcgttcgatctggctgcggcctgcgccggctttacttacgcgctcagcgtggccgatcagtacgtgaaaaacggcgcggtcaaacatgcgttggtgatcggcgcagatctgttgtcacgcacgctggatcctgaagatcgcggcaccatcatcctgtttggtgatggcgcaggggcggtggtgctgggggcgtctgaagagccgggcattctgtctacccatctgcatgccgacggcagctacggcaacctgctgacgctgccatataaggatcgccagaatcaagacaagccggcctatgtcaccatggcgggcaacgaagtcttcaaggttgcggtcaccgagctggcgcgcatcgtcgacgagacgctgcaggccaacaacatggaccgcagcgagctggattggctggtgccgcaccaggccaacctgcgcatcatcagcgcaacggcgaaaaaactgggcatggggatggacaaagtggtggtgacgctcgatcgtcacggcaacacctctgccgcctcggtgccttccgcactggacgaagccgtgcgcgacgggcgaattcagcgtggccaactggtgctgttggaagccttcggcggcggctttacctggggctcggcgctggttcgtttctgatttggacaggaagaaaaaatgacgcaatttgcttttgttttcccgggccaggggtcgcagaccgttggcatgctggccgagttggccgcccagttcccgatcgtcgaagaaacctttggcgaggcttcttccgccctgggttacgacctgtggcagctggtgcagcaaggtccggcggaagaactgaacaaaacctggcagacccaaccggctctgttggccgcttcggtggcgattttccgcgtgtggcagcagcagggcggtaaagcgcctgcgctgatggcgggccacagcctgggcgagtactcggcgctggtctgcgccggcgtgctggacttcaaggcggcgatccgtctggtcgagctgcgcggcaagctgatgcaggaagcggtgccggaaggcaccggcgcgatgtacgccatcatcggtctggacaacgacgcgatcgccaaggcgtgcgaagagtccgcgcaggggcaggtggtttctccggtcaacttcaactcgccgggccaggtggttatcgccggcaataaagaagcggttgaacgtgcaggcgccgcctgcaaagccgccggcgccaaacgtgcgctgccgctgccggtgagcgtgccttcgcactgcgcgctgatgaaaccggccgccgacaagctggccgtggcgctgcaggacatcaccttcaacgcgccgcaggtgccggtggtgaacaacgtcgacgtacgcaccgaaaacgatcctgaagcgatccgcagcgcgctggtgcgtcagctttacagcccggtgcgttggaccgagagcgtagaatttatcgcagcacagggagtgacgtcgctgctggaagtggggccgggcaaagtgctgaccggtctgactaaacgtattgttgacaccctgacggctgcggcggtgaacgacaccgccagcctgtcggcggcgcttgaacaataaagaggaaaatgatgagcttcgaaggtaaaatcgttctggtcaccggcgcgagccgcggtattggccgagccattgcagaaacgtttgtagcacgcggcgccaaagtgatcggcaccgcgaccagtgagagtggcgctgaagcgatcagcggctacctgggcgcaaacggcaaagggtttatgttgaacgttgttgatgcgcaatctatcgacagcgtgctggcatcgattcgtgccgaatttggcgaaatcgacattttagtgaataatgccggcatcacgcgtgataacctgctgatgcgtatgaaggatgatgagtgggaggatatcctcgacaccaacctgacttccgtattccgcctgtcaaaagcggtaatgcgcgctatgatgaaaaagcggtttggccgtatcatcaccatcggttccgttgtcggtaccatggggaacgcagggcaggcgaactacgcggcggctaaagccggtctgattggttttagcaaatctttggcacgtgaagttgcttctcgtggcattacggtcaacgtcgtggcacctggctttattgagacggacatgacacgggcgttgacagatgatcaacgcgcaggcattttgtcatcagttccagccaaccggctgggcgatgctaaagaaatcgccagcgctgttgcatttttggcctctgatgaggccggctatatcaccggtgaaacgttacatgtcaatggcggcatgtacatgatttaaaaaatgcgaaaaccatttgcgttatttgaggcaaaaaccgcaaaatagcgtaaaatcgtggtttgaccagccgggatttagttgcatctttttcagcattttatacactacgaaaaccatcgcgaaagcgagttttgataggaaatttaagagtatgagcactatcgaagaacgcgttaagaaaatcattgttgagcaactgggtgttaaacaggaagaagttttgaacaacgcttctttcgttgaagatctgggcgctgattctcttgacaccgttgagctggtaatggcactggaagaagaattcgacaccgagattccagacgaagaagctgagaagatcactactgttcaggcagctattgatttcatcaacgctagccagcagtaagagaacatatctaggcggtcgttcgaccgcctaagttttttctatccctagtgtcatatttttccctccctggaggacaaacgtgtctaagcgtcgagtagttgtgaccggactgggcatgttgtctcctgtcggcaatacggtagagtccacgtggaacgctcttcttgccggtcagagtggcatcagcctgatcgaccatttcgataccactgcctatgcgaccaagtttgctggcctggtaaagaattttaattctgaggatttcatctctcgcaaagatgcgcgcaagatggacgcctttatccagtacggtatcgctgccggcatgcaagccatgcaggatgcaggtctggacatcaccgaggctaacgccacccgcattggagccgcgatcggttccggcatcggcggcctgggtttgattgaagaaaaccacagttcactggttaacggtggcccacggaaaatcagtccgttcttcgtgccatccaccatcgtgaatatgattgcaggccacctgacaatcatgtacggcatgcgtggtccaagcatctctatcgccaccgcctgtacttcaggtgtgcacaatatcggccatgcggcgcgtatcattgcctacaatgatgcggacgtgatgctggccggtggggcagagaaagccagcaccccattgggcgtcggcggctttggcgcagcgcgcgccctgtccacccgtaatgacaatccgcaggcggcgagccgtccgtgggataaagaccgcgacggcttcgtgctgggcgacggcgccggcatgatggtgttggaagagtacgaacacgcgaaaaaacgcggcgcgaaaatctacgccgaagtggtgggctttgggatgagcagcgatgcttatcacatgacgtcaccgccggaaaacggcgcgggcgctgcgctggcgatggaaaatgccctgcttgacgccggtgtgaccccgtcacaaatcggctacatcaatgcgcacggcacctctacgccggcgggtgaccaggcggaagcgcaggcggtgaaatccgtcttcggtgccgacgcccaccgcgtgctggtgagctcgaccaaatcgatgactggccacctgttgggtgcggcaggcgcgatcgagtctatcttcaccgtgctggcgctgcgcgatcaggcagtaccgccaaccatcaacctggataacccggatgaaggttgcgatctggacttcgtgcctcacgaagcgcgccaggtcagtgatatggagtacaccttgtgtaactccttcggcttcggcggcaccaacggctcgctgatcttccgccgagtgtaactcgcgctgtcgaacgctgatgaaagcccggttttttaaccgggcttttttacgcctgccgtttggccgccggcggggctgcgtatcgtctcgccgcctgctatcctgcgagcgtaatgaaataacccggcaacaggaggaagcatgtactggattaacggacaacgccacgatgcgctggcgccgagcgatcgcggcctgcagttcggcgatggctgctttactaccgcccgggttatcgacggtaaaatcgagctgctgccctggcatctggagcggttgcagcaagcggcgcagcgattgatgctgcctgccacagattggctggctttcgagcgggagatggcgctggcggccgaatcaattccgctcggcgtggtcaaagcgatactgacgcgcggcagcggcgggcggggttacagcccgacggggtgcgaaaacccgacgcgcatcgtcgcccgcagcagctaccctgcgcactatttgcagtggcgcgagcagggcatcacgcttgcgctcagcccggtggcgctggcgcgcaatccgctgctggcggggttgaagcatttgaaccgcctggagcaggtgctgatccgcgcgcatcttgaccagacggccgccgacgaggcgctggtgcttgacactgccggtatgctggtggaatgctgtgcggctaatttgttctggcgtaagggaaaagcggtatttaccccggatctgagccaggccggcgtcgcgggcctgatgcggcggcgggtgatcgcgctgctggcgggctcggaataccgtctgcattgcgtcagtgaaccgctggagacgctggccgatgccgacgaagtgctggtgagcaatgcgctgatgccgctgctgccggtaaacgctgcgcaatcatggcgttatgcttcgcgccagctgtatgattttttgcgtccacactgttaaccatggctgattgatgaagaaaagaaagctgaaggtcctgtctgttattgttgttctggtattagcgctgctgttttggggctaccagaagatcgaacgctttgccgatacgccgctggctatccagcaagaaaccatcttcaaactgccggccggcaccggccgggtagcgctggaagggctactggtacgcgataaactggtgcacaacgggcgctggttccagtggctactgaagctggagccggagctggcggagtttaaagccggtacctaccggttcacgccgggcatgacggtgcgccagatgctgaaactgttggccagcggcaaagaggcgcagttcaccgcacgctttatcgaaggctcacgcctgcgtgattggcagcaggtgctgcagcagtccaaatacctgaaacacaccctggcgggcaagagcgaagcggagattgccgcagcgctcggcattgctgcaggagaaaccccggaagggcatttgtacccggatacctaccagtataccgccggcatgagcgacatcgcgctgctcaaacgcgcacacgtgcgcatgaacaaagcgctgcaggccgcctgggccggccgcgacaccagcctgccgtacaaaacgccggaggagctgctgaccatggcttcgatcgtcgagaaagagaccgcggtcccggaagagcgcagcaaggtggcgtcggtgttcgtcaaccgcttgcgcatcggcatgcgtctgcagaccgatccgacggtgatctacggcatgggcgaaagctataatggcaacatcacgcgcaaggatctggagacgccgacgccttataacacctatgtgatcgccggcctgccgccaacgccgatcgccatgccgggtgaggcctcgttgcaggcggccgccaatccggccaaaacgccttatctctattttgtcgctgacggcaagggtgggcataccttcaccaccaatctggcgagtcataaccaggcggtgcgcgtgtaccgtcaggcgttaaaggaaaagaatgaaaagtaaattcgttgttatcgaagggctggaaggcgcgggtaaaaccaccgcgcgcgatacggtggtcaatgtgttgcgcgaacacggcgtcagcgacatcgtcttcacccgtgaacctggcggtacgccgctggcggagaaactgcgcgatctgttcaagcgcggcatcgacggcgaattgccgaccatcaaggccgaagtcttgatgctgtacgctgcgcgcgtgcagttggtggaaaccgtgatcaaacccgccctggcgcgtggcgcctgggtggtgggcgatcgccacgatctctcttcacaagcctatcagggcggcggccgtggcgtggatccgcagctgatggcctcgctgcgcgacaccgtactgggcgatttccgcccggacctgacggtctatctcgatctgccgccgctggtcggcctgcaacgcgcgcaggcgcgcggccaattggatcgtatcgaacaggaggcgctgccgttcttcgaacgcacccgcgcgcgctatctcgagctggcggcgcaggatgaaacgatcgtcaccgttgacgcggcccagccgctggagcaggtgactgcggcgatccgcgactgcgtctgccgctggctgcggcagcaggaaggcgcataatgaactggtacccgtggctgaatggcccttatcgccagctgattgggcagtacgccgagggccgcggccatcatgcgctgctgctgcacgcggcggcgggcaacggtgacgacgcgctggcctacggcctgagccgttggttgatctgtcagcagcgcaacggtgaaaaaagctgcggcgagtgtcacagctgtcggctgatgctggcgggcaaccacccggattatcacgtgctggcgccggaaaagggcaagagcagcctgggcatcgaaccgatccgccaggtgattgaaacgctgtatgcccacgcgcagcagggcggcgccaaggtgatttggctgccgcaggcggaacagctgaccgaggcggcggccaacgcgctgcttaaaacgctggaagagccgccggagaaaacctattttctgctgggttgccgtgagccgtcgcggctgatggcgacgctgcgcagccgctgcctgtactggcatttggccagcccggaggagcagctcagcctgcagtggctgagccggcaggcggccggctctcagacggaccgcctcacggcgctgcgcctgcacgacggcgcgccgctggccgccgaacagctgttgcagccgcagcagtggcagcagcgcagctcgctgtgcgccgcgttgagcgccgcgctgccgcagcgcgatatgctgtcgatgttgccggtgctgaaccatgaagacgtcgccgagcgcctgcactggctgtgtgcgctgctggtggacgccatgaagtggcagcaaggcgcgcatcactatgtattgaatcaggatcagcaaccgctggtgcatcagctggccagcctgttgagcagcgcctcgctgcaacagatcgtgcaacagtggctgagctgccgccatcagttgctcagcgtggtgggcgtcaaccgcgagctgctgctgaccgaacagttacttcgctgggaacagatgcttggcgccgccggctattcccaccctcactcgctgtaaagttaaagagttaaaaattatgttgttagtcgattctcattgccacctagacagtctggattatcagacgttgcaccagaatgtggacgatgcgctggccaaggccaaagcgcgcgacgtcggctatgtgctggcggtcgccaccacgctgccgggctaccgctccatgaccgaactgatcggccagcgcgacgatgtggccttctcctgcggggtgcatccgctcaacctggaagaaggctatgattacgccgagctgcgccgcctggcggcggcggagcaggtggtggcgctgggggagaccgggctcgattacttctaccagaaggataaccttgagctgcagcaggactctttccgcgagcatatccgcatcggccgggatctgaacaagccggtgatcgtccacacccgcgatgcgcgcgcggatacgctggcgatcctgcgtgaagagaatgcacaggactgcggcggcgtgctgcactgcttcaccgaagatctggccacggccgaagctttgctggatctgggtttctacatctctttctccggtatcgtgaccttccgcaatgccgaacagctgcgcgaagtggcacgttacgtgccgctggatcgcattctggtggaaaccgactcgccttacctggcgccggtgccgcatcgcggcaaagaaaaccaacccgcctatgtgcgcgatgtggctgaatacatggcggtattgaagggcgttagcctggaacagctggccgaagccaccactgccaacttttcacgcttatttcacctcgatctgtgatctttgacctaggctatagctgtaggtcattgtctgcgtaattttttttaagctcgtaattaatcactgaaacgggtaaggttccctcccgtttcaaggtggttggtgcgcgttttttgctctcttttgccaaaaaaacgccgatttatgcaaagttgccgcggctcgatcatcgaaacgtgattgtcatcaaacattgcgcaggctatttattttactctgcgtaataaattcaaggggtgctcagacaccctgaattgcaggggtttttctcccccccttgcagcgcgacgtatcgcgacaagaagtagcaaagcattattactcaggagcacactcaactatgttcaagaacgcatttgcaaacctgcaaaaagtaggtaaatcgctcatgctgccggtgtccgtgttgcctatcgcaggtatcctgctgggcgtcggttccgccaactttagctggctacctgcggtagtctcccacgtgatggcggaagcgggcggttcggtcttcgccaacatgccgttgattttcgctatcggcgtcgctttgggcttcaccaacaacgacggcgtttccgcgctggcggcggtggtggcttatggcatcatggtgaaaaccatggcggtggttgcgccgctggtgctgcacctgccggctgaagagattgcggccaaacacctggcggataccggcgtgctcggggggattatctccggcgccatcgcggcctatatgttcaaccgcttcttccgcattcaactgccggaatacctgggcttctttgccggtaagcgtttcgtgccgatcatttccggtctggcggcgatcgttctgggcgtagtgctgtccttcatctggccgccgatcggtacggctatccagaccttctcgcagtgggcggcttaccagaacccggtcgtggccttcggcatctacggcgtggttgagcgtgctctggtgccgttcggtctgcaccacatctggaacgtaccgttccagatgcaaatcggtgaattcaccaacgcggcgggtcaggtgttccacggcgacatccctcgttacatggcgggtgacccaaccgcgggcaaactgtccggcggcttcctgttcaaaatgtacggtctgcctgctgcggccatcgccatctggcactcggccaagccggaaaaccgcgcgaaagtcggcggcatcatgatctccgccgcgctgacctcgttcctgaccggtatcaccgagccgatcgagttctccttcatgttcgtcgcgccgatcctgtacgtgatccacgctatcctggccggtctggcgttcccaatctgcattctgttgggcatgcgtgacggcaccagcttctcgcacggcctgatcgactttatcgtactgagcggcaacagcagcaaaatctggctgttcccaatcgtcggtatcgtctacggtctggtgtactacaccatcttccgcgtgctgatcgccaagctggatctgaaaacgccgggccgtgaagacaccgctgccgagcagtctgcgcagggcggttccgaaatgtccgcggcgctggttcaggccttcggcggcaaagaaaacatcactaacctggatgcttgcatcacccgtctgcgcgtcagcgtggccgacgtgtccaaagttgaccaggcgggcctgaagaaactgggcgcagccggcgtagtcgtcgctggttccggcgtgcaggccatcttcggcaccaagtccgacaacctgaaaaccgatatggacgaatacatccgtaatcactgattcaggcaggggagttaccaagggaggcgaaagcctcccttttttattgcctgctttcaggcgccaaggcgctgatttagttcagcgagagaagggaggaaccagacctgttcgccgcgattggcttcacgcacaaagtcttgcagcgcgttgctttgtgccagccagggagtgatatcgcccagcagcgccacacgcaggcggtagttgatgaatttctgcaatacggcgccggccacgccgctcctcagctggaaaaaggcggcgtccaggcggctgacggggaggacgatcatctcggcctcgtgttcaaaggcgggcgcgataaacaggctgacgtcatttccatctttcagcatcggcccggcctcggcgaaaaccaccaggcgcagatcatgaatttgctgcacggcgtagctcatcggcgctccggggctcagggtttggcgtgttgctgcaggtaatgctcgaacaccgccagcgtttcgtccgagatatggtgttcaatcccttcgctgtccagctcggcggtttcgctcggcaccccgaggcacatcagcagatcgaccacgatgcggtgacggcggcgcaccttctgcgccagttgttcgccttcctcggttaaaaacaccccgcgataagggcgcgactccaccagcccggcgcttttgagccgcgcgatatttttgatcgccgtcgggtgagacacgccaaagcggcgcgcgatatcggtggttctggcttcgcgggtgctttgcagcaaatcggcgatcagctcaacgtaatcttcgatcagcgcattggactgcgcttcgcgggcgcggctaaaacgcagggcgtgctcggcctcgtccggcatgtcggtcagggcggagcggtcggcgttatctggcgcgcgggtaaccatagcgtggggcgtcctgtaagcataaaaatggcgtctcccggcaatgcggggagggttgccctaagttagtccaaatagcacacattatcaattcgatgccacgcattgtggtagttagaaatatctctacacaaagccaatgaatttcgcctgttgcataaagtgtagccgatgctacattgtcagcatgaccggtggaaaaataaccagcaaaagattaagggcaattcatgcgtgacgcggcaaccccctcatcgttaaccgaacggaccaacatcgcgattggcgccgcccttgccggacgcaagcgcggtgccttcacgccgttgctgttcgccggcccggcggtgattgcctctatcgcctatatggatcccggtaatttcgccaccaacattcaggccggggcgaaatacggctacagcctgctgtgggtggtggtgatggccaacctgatcgccatgctgtttcaggcgctgtcggccaaactgggcatcgtcaccaaccgcaatctggcggaaatgtgccgtgaccagttttcacggccggtggtgatcggcatgtggctgctcagcgaagtggcggcgatggccaccgatctggcggagtttctcggcggggcgatcgcgctggcgctgctgttccatatgccgctgctggcggggatgggggtgacggcggtgatcacttatgcgctgttgatggtggaaaagaaaggtttccgcccggtcgagctgatgattggcggcctggtgggcatcatcgcgctgtgctacctggtggagatgttcatcgtgccggtggactggcaggcggccggcctcggcatggtgacgccgcagttgccggatgcccaggcgctgaccatcgccgtcggcattatcggcgccaccgtgatgccgcacgccattttcctgcactcgggattgactcagcaccgcagccccgccagcgacaacggcgagcggcgcaagctgctgcgtttttccaatattgaagtggtgatcgcgctggcgcttgccgggctggtgaatattgcgatggtgatcatggcctcgagcgccttccacgccggtaacagcgacgtggccgaaatcggcactgcctaccatacgctgacgccactgttcggcgcagcggcggccggcatcttcctggcttcgctgatcgcctccggcatttccagctcggtggtgggcaccatggccgggcagatgatcatgcagggctttgtcggcttccgcatcccggtgtgggtgcgccgcctggtcactatggtgccggcgtttatcgtggtggcgatgggcgtcaacgccaccgatgcgctggtctatagccaggtggtgctgagcctggcgctgccggcgccgatgatcgcgctggtgatgttcacccgccgccgcgacatcatgggcgagttcgccaacggccgctggaccagtctggcggcggtggtcggcacggtggtgatcgtgctgctcaacgtggtgttgctgctgcagacctttggcgtcgatatccctggactggggtgatcttgcgggccgcgcggggcgcggccgcgtcgctaaattataaattccccacgccgccgtccatctgcagctcggcgccgaccataaaggccgactcgtccgccgccagaaacaccgccgctttggccagctccagcgcgctgcccatgcggccgatcggcaccagcgcgcggatatcgtcgcgcaaggcccgctcgtccgcttccgccaaccccagtttacccaatgccggggtttcggtcgggccggggctgaggccattaacgcgaatgccgcgcgcgtgcagctcgccggagagcgttctggccagcgataacaaaccggctttgctggcggcgtaggcgctgctctgcggcaggccgatatgggcgctgaccgaaccgcacaggatcaccgaagaagggttggccagcagcggcagcagcgcctggatcagaaagaacggccccttcaggttgatgtccatcagccgctgatagctttgctcatcccactcctgcagcgggcgatgcgtgacgtcgccggcgttgatgtacagcacgtccagccgcggccaccgctgctccaactgctgcgccagcgcgcgctgctgtgggatgtcgccggcgtcgctcagcagcaacagcgccttgtccgccaatgcctggcccgccgcgtccagggcgcgttggctgcggccggtgatcgcaaccaaagcgccctcggcgatgaactggcgggcggtttccagcccgatgccgctggtgccgccggtaatcaatgcgtatttgccttgcagtcgtgacataaccgattcctctttagcgtctgttacggcattatttgcgctatagttccttttgcatagtaggcaccttttggatactaaaggacgaggagggatgaaatgacggcgcaagcgcccttagcggcggaaaataatttggcggccttgccgacggcgggcgaaccctgcccgatggtggacttcgtcaatctggtgtcgggtaaatgggcgataccgatcttgtaccggctgattatgatcgacggcccggtgcgattcagcgaactgcagcgggcggtggcgcccattgcgcagaaagagctgacgcgccagctgcggctgttcgaacagcgcggcctggtgacgcggcaggtgtttcccgaagtgccgccgcgggtggagtatcaggtcaccgcgctgggcaaatcgctgcggccaacgctggactcgctggccgagtggatgcgtcggcatgcgccgcagctgagcggcggctagtcgccgatgcccggcgggttgatggtggaacgctcgaccttttcgtcgccttcgccccagcgttccagcacctgcgcatattcgccgctgacgatcgcgccattgatcgcggcgttgatggcgttcaccagcccgttgccttttttggtggtgaccgcgacataggccacgctggggccgatgccgaccattttggttttgccggtcagcgccgccttgtaggcgccggtggagtgggggccgaagaacgcatcggcgcgcccggactgaatgctgaggttggtggcggcgtcgtcggtcacgtagatcggttgtaccggcggcagcccggcggcgcgattttgcttatcccatcccagcagaatgttttcctgattggtgccggatccgacgatgatccgcagaccggcgacgtcctgcggccggttgatcgcggtgatgtggctggtggatttgacgtaaaagcccagcgtgtccactcggtaagtggcgaagtcgaatttggttttacgctgtttggtgacggcgatgttgaagattgccgcatcgtatttgcccgtgctgatgcccagcggccaatcctcccaggaggtgggcactaggttcaactctagcccgaggctgtcggctaccaggcgggcgatgtccggatcgctgccgatcagcgttttattgtcttcggcgaacagtgccagcggcggggagttctcgaatgccaccgccaccgtcagcttgcctggcaccgcgaagtgaaagttcgccgggatcagcgcgatagcggcgggattcttctctgcgtgtatcggctgtcggttagcctgcaggtcgataccgcccgtcgtggccgcctgcacggcggcgctcagcaacagcgcgcacagcgccgaaattctcggtaacataacgccctctatcctttgttaatcatggggttactattggcggcggcgcggggcaagtaaagcaacaatagtgaataaccaaagtgaaaagatgcacaagcggggggccgggctgcgcgaatctgcagcactcgacgtggaaagtgcgcaatcaggttgaaagcagtagaatttgtcactcatactgcgtacagctaattgtgtaaaacaaggaacgccagatggccgaagaaacgattttcagtaaaattatccgccgcgaaatccctgctgatgtggtttaccaggatgaactggtgaccgctttccgtgacatctccccccaggcgcccacccatgtgctgatcgttcccaacgtgctgatcccaaccgtcaacgacgtgaccgtggagcacgaagccgcgctgggccgcatgatcaccgctgcggcgaaaatcgccgaacaggaaggcatcgccgaggacggctaccgcctgatcgtcaactgcaaccgccacgccggtcaggaggtctatcatattcatatgcacctggtcggtggccgctcgctggggccgctgctgtcacgttaagcgaggaaatcatgcgcggtaaaaaaactctgcgtggtctgatggcgttggcgctgcccgccgcgttgttgatgggatgcagctcaccgcccggcatcgcggttaaccaagggcagacggtggtgatggatccctcggtgctgaccgccggtattctggccgatacgccctcgatttcgaacgcttccgggcgggtgatggcaacctcggtgctcaataacagtcagccgacgccggtcaccgtacattaccgtttctattggtacgacgcgcaggggctggatattcgccccttcgagaaaccgcgcgagatcgtggtggcacccgactcggacgccaaaatctactcgattaacggcaatctggacgctaaaagcgcgcgtctgtatctgtacctgtaagcgcttgccaggtttggagaaaaagcatgaaaaagtacgtcttagtggcgctggccgcattcaccctgagcggctgtctgtcgcgcccgcctgagccggaacaaccgttgccgccggtcaccgtcgagccggatcagccgacgccgccggtggagcagccgcagccgccaactaccgagccggtgccgcagccgccgaaaatccagcagctcgactggctgggcagcgttcagccgctggtggggcagatgttgaaggccgatggcgtcacggccggcagcgtgctgctgctggacagcgtcaagaacaacaccaacggctcgctgcagatgggcaaagccaccgcggcactgtataaggcgttggcgtcgaactccactttcagcgtggtgccggaagcgaagctgaccagcgccagacaaacgctgggcctgtcggcggatgacagcttcggctcgcgcagtaaggcgattggcctggcgcgcatcgtcggcgcgcagtacgtgctgtacagcgatgtcagcggcgacgtgaagtcaccggcgctggatatgcagctgatgctggtgcaaaccggcgagatcgtctggtcgggcaatggcgccgttaaacgctgaggccgcgctgcgacgattgatggaaaccagactgccggcggtgaataccgccggttgtcatttcagcccggtgcaggggctgaccggcgagagctggcgcatcgacggctcgggcgtcacgctgctggcgcggcaacatagcgcggagaaacgcgcgctgggcgtgagcaggcggcgggaggcgcaggtcctgcgtcgctgtgcgccggggctggggccacgggttttcgcacagaataatcagtggcttatcctcgaatggcttgaaggtgacgtcgtcacaaattccgaatttgacgcgctgaatcagcgcggcgagctggcggcgatggtggcgacgctgcatcggcggccgctcagcggttaccggctggatctgcggcggcaattcctccgctactggcagcagctggatacgcggcgtttaacccccgcctggctgcgcctgcagcgtcattttttacgcagcgccttgccacggccgctgcgcctggcgccgctgcacatggatatccatccgggcaatctgctcaccaccggcgaagagctgcggctgatcgactgggagtatgccgccgacggcgacatagcgctggatatcgccgcgctgtttcgcagcaacggctggtcggccgaacagcagcagcgctttttgcagcactacgcgcatcagggctatcgcgacgtcgcccggttgcaggcgcaggtgcgccgttggctgccgtgggtggattatctgatgctgctgtggtttgaagtgcgctggcagcagagcggcgacgttgaatttttgcgctggggcgctgcggtgcgccggcgattctgtttatcatcatctgaattctgaacgaacaaaatgaagtgaggtgcccgtgggcccagtaatgctagatgtcgccggctacgagctggatgcagaagaacgcgagattttgaaacacccgctggttggcggattgatcctgtttacccgtaacttccacgatgcggagcaactgcgtgagctggtgcgccagatccgcgccgcctcgcacgatcggctggtggtggcggtagaccaagagggcgggcgcgtgcagcgcttccgcgagggtttcacccgtttgccggcggcgcagtcgttcgccgcgttgcacgatgcgcaggaaggcggccgtctggcgcaggaggccggctggctgatggcggcggagatgatcgcgcaggatatcgacatcagcttcgcgccggtgctggacatcggccacggcagcgcggcgatcggcgagcgttcgttccacagcgatccgccgcaggcgctggcgatggcggagcgctttatcctcggcatgcacagcgccggcatgaaaaccaccggcaaacacttcccggggcacggcgccgtcagcgccgattcgcacaaggaaaccccgcgcgatccgcggccgctagcgcagatccgcgagcacgacatggcgatcttcagcgagctgatcaaccgccagctgctggacgccgtcatgccggcccacgtcatctatactgaagcggatccgcgtccggccagcggctcgccttactggctgcagcagatcctgcgtcaggagctgggcttcgacggcgtgatcttctccgacgatctgtcgatggaaggcgccgccatcatggggagctacgccgagcgcggccaggcggcgctggatgccggatgcgacatgatcctggtgtgcaacaaccgcgccggtgcggtcagcgtgttggataacctgtccccggtcaaagcagagaaggtgaagcggttatatcatcgcggtcagttcacccgtcaggaactgcgtgactccgagcgctggcagcaggcgcacaaggcgctcagcgcgttgagcgagcgttgggaggagcacaagcagcgttcgcaagggtgaatccaggtgccgcatcgcggcgcagagcggaaatgatgagggccgcgcccgcggcccttggcttgttgcgaggatccacatgattatctatttgcacggcttcgattccaccagtcccggcaatcatgaaaaggtattacagctgcagtttatcgatccggacgtgcgctttatcagctacagcacgctgcacccgcgtcacgacatgcagcatctgttgaaggaggtggacaaggcggtgcagcagggcggcgatgcgcacccgttgatctgcggggttggcctcggcggcttctgggcggagcgcatcggcttcctgtgcggcattcgccaggcgatgttcaatcccaacctgtacccggaagagcacatgcacggcaagatagaccggccggaagagtatcgcgatatcgccaccaagtgcgtggaggatttccgcgagaaaaaccgcgatcgctgtctggtggtgctgtcgcgccacgacgaggtgctggataaccggcgcagcgccgaattgctgcatcactactacgagatcgtgtgggatgaacagcagacgcacaagttcaaaaacatctctccgcatctgcagcggctcaaggcgttcaaggcgctgggttaacagtttcataacgctgccgcgagccgcgcgccccgtttttcaccggcggaaagtgcggcttttttgtacgtcaaagcaagattctgtgtggcaatcggcaaaatttaaaactgtgactcagcgctaactatttgaatcacaatccccaaaaaatccccgcgtccagcctttaaccaaaaaaatttgatgtacgtcaattttggtatgaccaaataacctcacatgctattctggctgcagagagccgatttattttaagcgaaccctatgtattctaaggatattatttatttaccctgggataacaaatggttcacatttagggggttattttgacaacgccaaagaagaaaatcgttattgttggcggcggcgccggtggtttggagctggcgaccagcctgggccataaacttggccgcaagaacaaagccgagatcacgttggtggatcgcaaccacagccatttgtggaaaccgctgttgcacgaagtggcgaccggttccctcgatgacggcgtagatgcgctcagctacctggcgcacgcgcgcaatcaccatttcagcttccagctggggtcgttgaccaacatcaaccgtgagacgcaaacgctgcagctggcgcagatctgcgacgagcagggcggcgagctggtgccggcgcgcgaattgccgtacgacattctggtgatggcgttgggcagcacctcgaacgatttcggtacgccaggcgtgaaagagcactgcatcttcctggataacccccatcaggcacgtcgtttccacaacgaaatgctcaacctgttcctgaagttctcggcgcagccggggcaaaaagagcgggtcaacatcgctatcgtcggcggcggcgccaccggcgttgaactgtccgccgaactgcacaacgcggtgaagcagttgcacagctacggtttcgaaggcctggacaacagcgcgctcaacgtgacgctggtggaagccggcgagcgcatcctgccggcgctgccgccgcgtatttccgccgctgcgcatcaggagctgatcaaactgggcgtgcgcgtgctgaccaacaccatggtgaccagcgcggacgccaaggggctgaacaccaagggcggcgaattcatcgacgccgatctgatggtgtgggcggccggcatcaaggcgccggactttatgaaggacatcggcggcctggaaaccaaccgcatcaaccagctggtggtggagccgacgctgcagaccacgcgcgatccgaacatcttcgccatcggcgactgcgcttcctgtccgaaagagggcggcggtttcgtgccgccgcgcgcccagtcggcgcaccagatggcctcacgctgcgccaccaatattctggcgctgatgaacggccagacgctgaagccttacgtgtacaaagaccacggttcgctggtgtcgctgtcgcgcttcagcaccgtcggcagcctgatgggcaacctgatgcgcggttcgatgatggtggaagggcgcatcgcgcgcttcgtctacatctcgctgtaccgcatgcatcaggtcgcgttgcatggctacatcaaaaccggcctgatgatgctggtgggcggcattaaccgggtgatccgtccgcgcctgaagatgcactgatcccgcttttgtcgaccaacccgcgccggttcgcccgcgcgggtttttttatggcggcgcgagccgatcggcggcggttgcttgattcttctgcataagccgtcgccggcatgggtaaaattcttaagattcctcctaaacaacgggaaaacggccgttttcccgcatttttggtccccttgtcttattgcgggccttcagatcattgtgcagactttacctcgtttacagacggcgcgtcgcgcacgccgtaaaccgggataccgccagccgcccatgcgcaaaataataagcgcggtgccagccggtaacagaccccggaaaaaatgcgtggtaacactttcaggaggtttcctgtgaacaagtcaatgttagccggtgttggaattggcatcgctgccgctctggggattgccgcggtagccagcctggacgtcttttctgccggtccgcaatatgcgcaggtgctcgccgccacaccgattaaagaaaccatcaaaacgccgcgtcaggaatgccgcaacgttaccgtcacgcaccgtgcaccggtgcaggatgaaaaccgcatcgccggttctgtgctgggcgcagtggcgggcggcgtgatcggccaccaattcggcggcggtcgcgggcgcgacgtggcgaccgtggtcggcgcgctgggcggcggctacgccggcaaccaggtgcaaggggcgatgcagaacaacgacgtcaccaccagcgttcagcagcgttgcaaaacggtctacgacaagtcccagaaaatgttgggctatgacgtgacctacaagatcggcaatcagcagggcaagatccgcatggatcacgatccgggcacgcaaatcccgttggataaaaacggccagctggtgctgaacagagcctgatcgccacattcgaattaaacccgcgggcagtgttagttctgatcgtttaacccggttaagcgagcggcgttaacattgacgcgggtttctgttttctgcctgcccaaaagtttgcgatcgttctaatgtctgcgtgcgatatcgctgggcgaaacttcaaaaaagcccctgcgtttgttatattattgtgcaattaagcggtgttatcggcgccaatcgccacaccggccaaacccgagtatttcgtctcgcagagataacgacatgttagattttcgctttccgacagcgttgcaaatggtccttagcgtcgccgtagctgagaagcagggcatgcgttcgacgagcgccaccctcgccgccgctctggaagccaaccccagctttatccgcaaactgatggtgccgctgaccaaagacggcatcatcgtttccaccttgggccgaaacggctctatccacctcggccgcccggcggaagagatcaccctgcgggacatctatctggcggtgatcgacgacaagcgcatctgggcttcccgccctgaagtgccggctcgttgcctggtgagcgccaacgcctgctggtatttcaaatcggtggtgaacgaggccgagcaggcttcgctcgcggtgctggcgcgccacaccgtggccgactcgctggccgagctggagcggggcgacaagcgcgcctgcgcggaatacgccgccgagcaagaggctgaagccgccggtaaataatgccggatggagcgcataaaaaaggtcgggtattgcccgacctttttgcatttcaggatgatgattacgccgtctgcggctgcgctttgcgggccaccaggcgccgcaaggtgacgtagaacaccggcgtcaggaacagcccgaacagggtgacacccagcatgccggagaacaccgtgatgccggtgacgccgcgcacttcggcgccggcgccatggccaaggatcagcgggatggtgccggcgatgaaggcgatggaggtcatcacgatcggccgcagccgcaggcggcaggcctccagcgccgcttcgacgatgcctttgccctgcatttccagttcgcgggcgaactcgacgatcagaatggcgttcttgcaggccagccccatcagaacgaccagcccgacctgaacgaacacgttgttgtcgccgccggtcagccacacgccgaacagcgccgacagcatggtcatcggcacgatcaggatcaccgccagcggcagcgtccagctttcgtacagcgccgccagcgcgaggaacgccagcagcaccgcgaccgggaataccaccagcgcggcgttgccctgggtcgattgctggtagctcagatcggtccactggatgttcatgccgttcggcaacagcttgccggccatttgcgtcagcgcgctcatcgcctgggtagaggagaggacgcgcggatcggcgtcgccgatcaggtccgccgccgggaaaccgttgtagcggatcaccggatccgggccgtaggtggtgccgatgctgaccatactgccgatcggcaccatttcgcctttgtcgttgcgggtgcgcaggttggcgatgtcttccacgctgtcgcggaattggccgtcggcctgcgccatcaccttccaggtgcggccgtaacggttgaagtcgttaatgtaagacgaaccgaggtaggtctgcagcgtgctgaacagcgcgttgagcggcaccccctgggccttggccttgtcgcgatcgattttggcgtccagctgcggcacgttggcctgataagaggagatcgggaaacccatgcccggcgtttgcataatggcgccggacatcgtgttgatcgcggtctgcagcgcgccgtaacccagcccggcgcgatcctgcacgtacagtgaatagccggagccctggccgatgccgaggatcggcggcggcatgatcgagaaagcgaagccttcctggatctgtgaaatgcgcgcgttgatctcggcgttgatctgcgctgcggtgcgggtacgggtgctcaacgactccagcgcgaagaacaccgtgccggtattcggcgtattggtgaactgcagcgcgttcaggccggggaaggccaccgcatcggtgacgccgtccacgctcaggccgatggcgctcatcttgcggatcaccgcatcggtgcgctccagcgaggcgccttccggcatcttcacgccgccgatcaggtatagcttgtcctgcgtcgggataaagccgccgggcacggtcttgaacatcacgccggcggcggccagcagcagcaggtagacgacgaacaccgcgccgcgccggcccagcacgcgggagacgccctgttggtagcgttgcgaaccgctggtgaagaagcggttgaacggccggaacagccagccgaacagccggtcgatcaggcgcgacggcaggtctttcggcgcgccgtgcggtttcagcaagcgcgccgccagcgccggcgacagggtcagcgagttgatggcggagatcaccgtcgagatggcgatggtgacggcgaactgcttgtagaactggccggtgacgccggaaaggaacgccatcggcacgaacaccgcacacagcaccacggcgatggcgatgatcgggccggagacctcgcgcatcgcctggtgcgccgccgccagcggcgacagcccctcttcgatgttgcgctcgacgttctccaccaccacgatggcgtcatccaccacgatgccgatcgccagcaccagcccgaacaggctgagggtgttgagcgagaagcccagcagatacagcgcggcgaaggtgccgaccacggagatcggcaccgccagcagcggaatgatcgaggcgcgccaggtctgcaggaacagaatgaccaccagcaccaccaggatcaccgcttccagcagggtatctaccaccgcgcggatcgagtcgcgcacgaataccgtcgggtcgtatggcgacttccagctcatgccgtccgggaagcgggtcgccagctcggccatcttgccgcgcaccgcgtccgacagctcgatggcgttggcgcccggcgactggaagatgccgatgccgaccgcatccttgttattgagctgggcgcgcagcgcgtagctgccggagcccatttcgatgcgcgccacgtcgcgcagccgcacgatctcgccgttatcgccgctcttgagaatgatgttgccgaactcttcttcggtttgcagacgcccctgggcgttgatcgacagcagatagtcgctgcgcgtcggcatcggctccgcgccaagctggccggcggaaacctgcacgttctgctcctgcatggcgctcaccacgtcggaggcggtcagcccgcgcgcggcgactttgttcggatcgagccagatgcgcattgcgtattcgccggcgccgaagatctgcacctggccgacgcccggcagacgggccagctcatccttgaccttcagggtggcgtagttgcgcaggtacagcgagtcgtacttgccggaaggcgataccagatgcaccaccagcgtcagcgccggagactgtttctgggtggtgatgccctggcggcgcacgtcttccggcaggcgcgcttcggcctgcgccacgcggttttgcacctgcacctgcgcctgatcgggatcggtgcccgggcggaaggtgacggtggtcaccagcacgccgtcggaaccggcgaccgatttcatgtacatcatgttttcgacgccgttgatcgcttcctccagcggcgtggccaccgtttcagcgatctctttcgggttggcgcccgggtattctgcacgcacctgcacgctgggcggcaccacgtccgggtactcgctgatcggcagcagcgggatggctatcaccccggcgacaaaaatcagtatcgacagcaccgcggcgaagatcggccggtcgatgaaaaagcgggaaaagtccatgggtcagaagtctctgctgggagcttagttaagcgtggaggcgataggattcatggcgacggctttcgcgtcgaccggcatgcccggcataaacactttctgcatgccgtcgacgatcacccgatcgccgtttgccaaccctttctgcacgatgcgcaatccttcggccatgcggcccacgtcaatgtcgcggcgctgcgccttgccgtctttatcgacgatgtaaacgaacttgcggttctggtcggtcatcaccgctttgtcgtcgatcagcatggcgttgaactcggcgctgccgggcatctgtacccgggcgaacagccccggcgtgaagcggcgatcgcggttgtcgagcagggcgcgcatgcggatggtgccggtcccggcgttcagttggttatcggtgaagtccaccagcccctgatgcggagtgccgtcttcgcctaccaggccgactttcaccggcaggcgggcatcgtgccggccttgctgctgatagcgcaggaaggtggcttcatccacgtcgaaatagacgtagaccttgtcgagcgacaccagcgtcgtcagcacgctggcgctgtcgccggcggtgaccaggttgccggcggtgatcatcgcgcggctggcgcgcccgtcaatcggcgcggtaacgcgggtaaagtcgagattcagctgcgccatatcaagctgggcctgcgccgccagcacgttgctttgcgcctgcgcggcggatgaccggcgctgctcccatacttcctgagagatggcctgagtgccgatcagtttctcggtgcgcgaggattcgctgcgcgccagggctgcctgattgcgcgcccgcaccagctccgcctgcgcctgttcgcgcgcggcgcggtaggtgcgatcgtcgatagtgaacagcacctggcctttcttcacctcgtcgccttcggtgtagttgacccgctcgatgtagccggagacccgtgggcgcagttgcacgctttgcaccgcttcgacccggccgttgaaggcatcccactggctgatcggcttgaccactacgctggcggcgctgaccaccggtggcggtggcggggcgttgtgcgcgacgctgttgtcgcacccggcgagcagggcggccagcagcgccaccccggagagccgctgacccagagcgacggcgcgcgtgtggccgccggcgttgaacgatgagtttggttgatttgccattatttttattccgataagtaagcgcggtcaggccccacacccggccctgttctccgggattcgcccccgcaccggcgtgcggtgagggggcggctgcgccgtgcagcggcgcaacgttaggttttgaaacacattggtgtcacattaatgtatcaatatcggttacattaattgggtggagtatagtggcggctttccggtaaatgcaataataaaaattgcatttaaagcgaaactgttgcaacgtatgtgcatcgggcagagggtgaccctgccgaatgatgggagcatctgcatgaacactacgggctttattaccgatttgaaggcgtggatcgacaacaatctggaagagaaactggatatcaacaccgtggcggaccgcgcgggctattccaaatggcatctgcagcgcatgttcaaacgccagaccggctacgcgctgggggagtatatccgcatgcaaaaactgaaagtgtcggcggagcgcctggccaacagcggcgagcctatcgtcagcgtggcgatctcgctcggcttcgactcacagcagtcgttcaaccgcagcttcaaacgccaattcggccaaacgccgggcgattggcgccgcgcgctggcgcagccggcgtcaatggggcgcacgcaccactgagcggttggggtgtggggagaaaaaaagcctgaatttgcgttcgggcttttttgtatggcggtgagggagggatagattcgctgcgctcaccctgcgggccgccgttggcggtccaaaacgcaggcgttttgtcgaaccctgtcgaggcttctcgcccctctcggcggtgcgccatgcaaaaaaaaacctggacgcgaatccaggctttctcttcgaatttggcggtgagagaggggttcgaaccctcgatacactttcgcgtatacacactttccaggcgtgctccttcagccactcagacacctcaccgttttgtcgtcgataacgccttgcgctgtcgacgggcgctaatgtaggagaatctgatctcagcgtcaaccctcttatttcattctcatgactgtttagccaaacttgcagcaatttgctgatttaccgaacgatattcccacgcttggccgctggcgggcagggcggactacgttcaaaacgcgtgaaagatgattgtttgacctttttctgtgcgagtagctcaatatatcgccaatgagatcggtctatttgctgttatatgcattaatactggattattagtcaaatgtgtcgctaaatggaattatgtcggcgcggcgtttttggcaaggaatatcacggcgccgcgcagattgccgggagacaggccggcgatatcgcagacagggacagactcattacataataatgcagtagaggttcgttttgactccttcagatgccatgccggcgccgcaagcgcgccatgccattccccccggtgcgggggcgctgttcttcatccagatcttcgccacactgggcttcgccgggctttactccacgctggtgctgtacgccaccaagcgattgggcttcaacgaaagcagcgccaacgccatgatgggcgtgttcggcgccttcaactatggtctgcacatgttcggcggctacctcggcggccgtttcctcagtaaccgcaatctgttcgtgctgggcatggtgttgcaggtgatcggctgcgcgctgattgccgtcgcgggcgtgtgggggctgtactgggggctggcgatgttcctgaccggcagcggccttaacgtgacctgcattaatatgatgctcacccagcgtttcaaaccggatgatgaccggcgcgaatcggcattcctgtggaactacgctggcatgaacctcgggttcttcgttggctttaccgtcgccgggtatttccaactgacggaaaactatcgcgcgctgttcctgttcgccacgctgggcaatgcggcggcgatcatcgtcgccgtctgccgctggcggattctggcggatctcaatacgccgctgcacgatgccagccgcagtcaataccgttggcgcatgctggtcgggctggcggtgctggtggcgctggtgccgattatccgcgtgatgctgacccacgccgagttcagcggccatttcgtgatcgtgctcggcgcgctgatcttcctgatgctgtgcgtggtgacgctgcgccaccatccgcgcgatgagcgccgcagaatggcggcctatctgatcctggcgctggggtcgctggtgttctgggcgctgtatcagctggcgccgatggggctgatgctgttctccgagcacaacatcaacctgaacgtttacggcattcaggtggcgccgcagtggatccagaatatcaacacgctggtgatcgtggtgggcggcccgctgctggcctggtggttcaatcgcctgcgcgcccgcggttgcaacatcgacattccgctgcagttctccggatcgctgttctgcatcgggctcggcatgctggtgctgccgctgggcatcagcatggccggcggcgacgggctggtggcgtttaaatggatcgtcatcagctatgtgctgcaaagcgtcggtgaattgatgatctcgccgatcggttacgcgatgatcggcaagctggcgccgccgcgctatcagggcgtgatgatgggctgctggatgatggtgaccggcgtcgcctcggtgctggcgggctacgtctccggcctgatgccggaaaacagcggcagtacgccgctgcaaaccaatcccggctacagcgaaatcttcagcgcactgggctggggggcgacgggcgtcggcgtggcgatgctgatcctcattccgctgctgcggcgtcttatccggcgcgacggtccgtctgccgcctgattttgcgcacatgcacaacagccccactggtcggggctgtttttattttgggctttaacgcttgcatccggcgatgaatcgcggaaggctgaaggaaaaccaataaaaacaaaccggagcccgcagtatgaacatcatctattaccaccccttgtttaacgcccaggaatggctgatcggcatcaagcaacgcctgccgcaggccgagatccgcgaatggcagcgcggcgacgagcggccggcggattacgcgctggtatggcgcccgccgcacgagatgttagccaaccgccgcgatctgaaagcggtgttcgccctcggcgccggcgtcgacgccattctcgatcaggagcgcaaacaccccggcacactgcccgccggcgtgccgctgctgcggctggaggataccggcatggcgcagcagatgcaggaatatgcgctgagctatgtgctgcgctatttccgccgtttcgacgagtatcaggcgttgcagcagcggcaggaatggcaaccgctcgatccgcactcgctggatgatttcactatcggcatcctcggcgccggcgtgctggggcagagcgtggcgcgcaagctgaccgagtttggctttagcgtacgctgctggagccgcagcgccaaacagatcgacggcgtgcaaagcttcgccggagaggcgcagcgcggcgcctttctcgacggcgtcaaactgctgatcaacctgctgcccaatacgccggagaccgtcggcattctcaaccgtgagctgttcgcgcaactgcggccgggcgcttacctcatcaacatcgcgcgcggcgcgcatctggtggaggccgatctgctggcggcgctggagcaggggcaactggccgccgccacgctggacgtgttcgcccgcgagccgctgccgcaggatcacccgttctggcgtcatccgcgtgtcaccattaccccgcatattgctgccatcacgttgccgcagcaggcgatggatcagatcgccgccaacatccgcgcgctggaggcggggcatgccccggccggcgtggtcgacaggcaacggggttactgagccttcagccgccgttcggtaactgataagctgttatcgtcatcgcgcctgtccgtacctttgcgggcgggccctctggaaggagaaacaatgtaccccgttgatttgcatatgcacaccgtcgccagcacccacgcctacagcacgctgcacgattacatcgccgaagcccagcagaagggcatcaagctgttcgccatcaccgatcacggcccggacatggccgatgcgccacactattggcacttcatgaacatgcacgtgtggccgcgccgggtgaacggcgtgggcattttgcgcggtatcgaagccaacatcaaaaacctgcagggcgatatcgactgcaccggcccgatgctgacggccaccgacgtgatcatcgccggtttccatgagccggtgtttgcgccgcaggataaagcgtccaatactgaagcgatgatcgccgcgatggcgcagggagacgtgcatatcatcagccaccccggcaacccgcgttacccgatcgatattcccgccgtcgcggcggcggcggccaaatacgaggtggcgctggagctgaataactcgtcgttcacccactcccgcaagggcagcgaggccaattgccgggcgatcgccgccgcggtgcgcgacgccggcggctggctggcgctgggttcggattcgcacgtcgctttttcactgggtaatttcgagcactgcgagcgcatcatcgaagaggtgggcttcccgcaggagcgcattctcaacgtcagcccgcgccggttgctggattttctcgagcggcgcggcaagccggcgattgcggaattggccgatttgtgacatcgtcccggcaaaattttccgtattgtataaggcattatcatgaatgagttttccattgtctgccgcgtgctgggtacgctgttctaccgccagccgcaggatccgctgctggtgccgctgttcgcgctgatcaaagagggcaagctgcagcagcactggccgctggagcaggatgacctgctgaagcgcctgcagcagggctgcgacgtcaaccagctggcgaccgactttaacgcgatgttcgtcggcagcgaatgcagcgtgtcgccgttccgctccgactacgtcgaaggcgccagcgaagcggaagtgcgcaccttcctgcagcagcgcggcatgccgctggcggaggcgccggccgaccatttcggccagctgctgctggccgcttcctggctggaggatcagtcgcaggaagatgaagcgcaggcgcagatcgcgctgttcgacgagtttctgctgccgtggtgcggccgcttcctcggcaaagtggaagcgcacgccaccaccggtttctaccgcacgctggcgctgatgacccgcgacgccatccaggcgatgcgcgacgagttggcggagtacgagcaggacgacgaagcgggcgacgaagacgcgtaacgccgcagccatccaggcgggccgcccggcccgccgatccgctaaacacaggtttgcatcccccagacgtaaattgacaaaagatcccctaatctggcggtttaccgtcggttcggccgcgcctgcgcgccgcgctttttcacgcaaggggtagatgatgaaaagtaactggatgcagcagattcaaacgttgatcgggcagaaggccggcgcgatgggcggggcggaaggcatcggcaagctgctggcgcccacggcgctgggcggtttggtcggcgtgctgttggccaacaaatcctcgcgcaagctggtgggcaagttcggcaagaatgcgctgattatcggcggcagcgcggcggtgggcgcggtgctgtggaacaagtataagcagcgggtgaaagagacccatcaggacgaaccgcagttcggtttgcaaaccgcgccggtggatctgcgcgccaagcgtttggtgcaggcgttggtgttcgccgccaagagcgacggccatatcgatgccgacgagcagcgcgccatcgatcacagcctgtcgcagctgcaggtgggggaagaggcgcagggctgggtgcaggaagcgctcgatcagccgctcaacccggaattgatcgcccgcagcgtgcaaaacgaagacgaggcgctggaggtttactacctgagctgtctggtgatcgacgtcgatcactttatggagcgcggctacctcgatgcgctggcgcaggcgctgaagatcccagcggacgtcaagcagggcatcgagagcgacgtcaacgagaaaaagcgcgagctggcgtagcgccgcttggcaagccggggggaatcgtgtcactcttgccgcaatctatgtaagcggatgatttagcaatgatgaccccaccgaaagcggaaaaacgcccttatcccatcaccattcacggcgacacgcgcgtggatgactactactggctgcgcgacgacgagcgcgcagaccgccaggtgctggactacctgcaggcggagaacgcctacaccgatgcgatgctgaagccgcagcaggcgctgcgcgaaaccctgtacgaagagatggtggcgcgcattccgcagcaggaacattcggtgccttacgtgcgccacggctatcgctatcagacgcgctatgaaccgggcaacgaatacgcgatttatgtgcgccagccgcaaaccgagagcgagcactgggaagtgcttatcgacggcaaccagcgcgccgagaaccacgagttttacaccctgggcgggctggacgtcagcccagacaatcagcggctgggggtagcggaagatttcctgtcgcgccgccagtatgacattcgtttcaagaacctggccgacggcagctgggcggacgaagtgttggaaaatacctccggcagcttcgagtgggctaacgactcctcgacggtgtactacgtgcgcaagcacgccaagacgctgttgccgtatcaggtctatcgccacgtggtgggcagcgatccgcagcaggatgagctgatttacgaagagctggacgataccttttacgtcgggctggagaagaccacctccgagcgttttatcctgatccacctgagcagcaccaccacctcggagatcctgctgctggacgccgatcgtgcggacgccaagccgcagctgttcgtgccgcgccgcaaggatcacgaatacgccatcgatcactatcaccagcatttctacatccgctccaacaaggacggcaagaacttcggcctgtaccagagcgagcaggcagacgaagcgcagtggcagacgctgatcgccccgcgcgccgacgtaatgctggagggcttcagcctgttccgcgattggttggtggtggaagagcgcaatgccggcctgacgctgctgcgccagatccactggcagacgggcgaagagaagcgcatcgccttcgacgatccgacctacaccacctggctggcgtataacccggatccggaaaccgcgctgttgcgctacggctattcgtcgatgaccaccccgaccacgctgtacgagctgaacatggacagcggtgagcggacgatgctcaaacagcaggaggtgaagaacttcacgccggaaaactaccgcagcgagcgggtgtgggtgaaggcgcgcgacggcgtcgaggtgccggtctcgctggtgtatcgccaggacagcttccagcgcggcgccaacccgctgatggtgtacggctacggctcttacggcagcagcatggatccggcgttcagcgccagccgcctgagcctgctggatcgcggtgtcgtgttcgcgctggcgcatattcgcggcggcggcgagctggggcagctgtggtatgaagacggcaaactgttcaacaagcagaacaccttcaacgactttatcgacgtgaccgaaacgctgatcgcccaggggtacggcgacggcaagcgggtgttcgccatgggcggcagcgccggcggtctgctgatgggcgcggtgatcaaccaggcgccgcagctgttccacggcgtggtggcgcaggtgccgttcgtcgacgtggtaaccaccatgctggacgagtcgatcccgctgaccaccggcgaatacgacgagtggggtaacccgaacgagcaggcctattacgactacatcaaacagtacagcccgtacgatcaggtgaaggcgcaggcatacccgcatctgctggtgaccaccggcctgcacgattcgcaggtgcagtattgggagccggccaagtgggtggccaagttgcgcgagctgaaaaccgacgatcggcagctgctgctgtataccgacatggatgccggccacggcggcaaatccggccgcttcaaggcctatgaggatattgcgctggagtacgccttcattctggcgctggcggagtaacggcgaacagcgggcggcctgcgccgcccgctgtgctagccaatcagatagtatttcagcgtgtgtttcatgtccgggctcagatcgtcgatggatttcagcatccagcgcagatagccgggatcttcctgggcgatgcgatcgatttcctgcccgcgatacttgccgaatttgaacttcttcagcagcaccggctgttcggtgatctgcaccatttgctccggcgtccagcccgaatccttgatgatgcgttgcagcagcgcggcggtgacgtagcagtcgtacagcgcgcggtgcgggtacagcgtggcgtctgccggcagctgcacgtccaggttcagcgcgtagcgcagatactggttgccgtacttgatgtccggatacagcgtgcgcgccagcttgagggtgcagatccaggcgccgttcatctccggcaacaccccgcgatcaaaggcggcgttgtgcgccacatagtaggggctgccctgatagcggccgatcgccaccgcaatgcgcggtttgccttccaccatctgttcggtgatgtggtgaatagccatcgcgtcgaggctgatggggcggtccgggctgaccaggtcgctcatcggattggttaactggccgtcgagcagatcgagggaggccacttccaccacgccgccgtccagcccgcaggtctcggtatctattacgcgtaacgtcatgctttcctccgcgttgccgtcaggcttcagcttaaccggcacaggcggccgtgccaaccgtcgaaagtcttgccggcgatgatcagcccaggagcgtcatccggcgcggcaaccaaaagcgctcccgtttcatcccagatggcgctgcggcctgccgggatccagccgccggtcggcgccgcatggttggccatcagcgtgaccatgccgtaacgccgggcatagcctgccagcgcggcgctgtctttcgcgtaaccggcttcagataccagcacgccggcagcataaatctgcgcgcccgcctgtgcggcggcgcttgcgtggccgggctccgaagtatcggcgcagatggccagcgcgatgcgctgccgatgtatttccagcagcgagccgccatcgccgggcaagaaccgttgccgttccgcgccgtgcagatgctgcttggtatagggcgtcaatgcgccattggggtgaaagatcaaggcggcgatatgcagcgcctggccgctgcgtaagggcgcgccgacgatgatcgtcatctgatgcgattgcgccgccgcagcgagcggttgcagacgcggatcgcccagcgtcagcgccagttcggcagcatcagccagttcatagccgctgagcgacagttcgggaaacaccagcagctgcacctgctgttgggctgcctgcgcgacaaattcaaggtggcgttcaaggttacaggcgatatcggccgcagcggcggggtattgggcggcggcgagggtgaagcaggacatcggccatctctcctgtgaggcaataaaaaacccgccttggcgggtttaatgacggatggaaggacgcttactcaccagacggatgcgcttttttggcgcgtttctccgcacgtttctctgctggggttttcaacggcttcttcttcgcattttttttgctatccattcccttactcatgatggcctctcgttacctatgattgggtggcttgctcagccattaaccgcctaaagccggcaggatgcaagcgacaaagtgcgaattgcacttaaccggctgtttgcacgtgaaattttgtttttggatgaccgggtgataaaaataattattatgttataatattacactttcaatattcggagaacgcaatgactgtgatggcattaccggatgcgcagcaactgctggccatgccggattctgattatatgaactcggttcaacgggcgtttttccgtcagctgctgcaggatgagcggcaaaagctgctgctgcacatcgatgagctgaaaaaagagatcgatggcggcgaagcgacgggcgatgaggccgacaaggcggcgcgcgaagaggatttgcgcctgctgttccgccagctggatcgcgaaagccgcctgctgccgaaaatcgatgcggcgctggcgcgcttgcagaacggcgaatacggctactgccgggaaaccggcgaacccatcgggctggcgcgtctactgctgcgcccgacggcggagctgagcatcgaggcgaaaaccgcgcaggagatgcgtgagccgcatatgcgtaaaggcgggtaaggtctcagccgccgagcgtatccaccaacagatcgagaaagcgcctgacgcgaggttccagcaggcgcttattcggatagagcgccacaatcctgacttcttcacccgccacggcgcgcaacacctgctgcagacggccggcggccaggtcctccgcaatcataaactccggcagatacgcgatgcccaacccggacagagcggcgtcgcgtaacgcttccccactgtctagccgcaggcggccgcgcaccggggccttgacccattcgccgcgctcgtcgcgcagccgccagggctgtttttggttgcggctgctgaacagcagagcctcatgcccggcgagcgactcgacggtaagtggttcgccacgggcggcgaggtaggcgggggaggcgcacagcagggcgcgatacctggcgagggttctggacaccagccgggtatccggcgccgtgacgccgatccgcaccgctaaatcaaatccttcttccacgatatccgccaggcgatcggaaaaactgatctccacctgcacctcaggccaggcgacgagaaatttcggcaccagcggcaacaggatccgtctgccgaaggcggcgggagcggtcaaccgcagcaccccgcgtgcggtgcctttgtcgccggccacgctggcctcggcgtcgtcgaccgaagcgaggatctgcagaccgcgccgataaaactcccgcccctcgtcggtcaggccaagtgaacgcgtggtgcgatgcaacagccgcacgctcagccgctgctccagacgcgcgatggctttgcccgccgccgagcgcgacagccccatcgtctgtccgccggcgacaaaactgccggcgtcgacgacggccatgaaaacctgaatgtcattgagattcgcccgcaacatgccgccccccgagattcgatgataagataattaatttaacatattcaatgaattaactgcatatccaatgtcgtttcagtgacgacgtccattcgccaatcaaacgattatagtcgccatggaaacgataaacggttggagaagcagcatgaaaaacggcatcacgcactaccatcacggggtcatttgggaagaggagaatggcgtgtcccaaggcgttcgcgtcaaagacaccctctatatttcggggcagttttcccatgatatgcagggtgagtttatcggcgcgggcgatatcgaacggcaaacccaacagacgttggacaacctggatcgggtattggcgggattcggcgccgaacgttcgaacctggcgtatgtggagatctatctgactgacgtacaggcgcattttgaaccctgcgttgcgttgttcaaacgctatgtcggcgctcaccggcccgccggttcgctgatcggcgtcaccgggctggcttcgcccgagcagttggtggagatcagcgcgattgcgcacctgaactgatcgggcctgtgggcgttttgcaagcaggtcgttgtgattttgagcaaacgcgcgccgagttcccggcgcgcgttcgagttttcgggttttaccgttgacctgccgggcggcttccgctttgatgaaagcatgactcacagagagacggaaagcgccatggaacaattacgaggtttgtacccgccgttagcggcatacgacagcggttggctggacactggggatggccaccggatctactgggagctgagcggtaacccgaacggtaagccggcggttttcattcacggcgggccgggcggcggcatctccccgcatcatcgtcagctgtttgatcccgaacgctacaaggtgctgctgttcgatcagcgcggctgtggccgctcccgtccgcatgccagcctggacaacaacaccacctggcatttggtggccgatatcgaacggctgcgggaaatggccggcgtcgaacaatggttggtgttcggcggttcctggggctccacgctggcgcttgcctatgcgcagactcacccggagcgcgtcagtgaaatggtgctgcgcggcatcttcactctgcgcaagcaggagctgcattggtattaccaggacggcgcttcgcgcttcttcccggaaaaatgggagcgcgtgctgtccatcctctcggatgacgagcgtaaagacgtgatcgccgcctaccggcagcggctgacctcggccgatccgcaggtgcagcttgaagcggccaaactttggagcgtgtgggaaggggagacggtcacgctgctgccgagccgcgaatccgcttcgttcggcgaggatgattttgcgctggcgttcgcccgcattgaaaaccactacttcacccatctgggcttcctggagagcgacgaccaactgctgcgcaacgtgccgctgatccgccatattccggcggtgatcgtccacggccgctatgacatggcctgccaggtgcagaatgcctgggacctggccaaggcctggccggaggcggagctgcatatcgtggaaggggcggggcattcgtatgatgagccgggcattttgcaccagctgatgatcgccaccgaccggtttgccggcaagtgacgcaaaaaacccgccgtaacggcggggttttttttttggcctttggctcgtacggcaggcgcgaaaacctgtgggattccgcgcggtagtgcgccacgcgctcgcgaaaatagtcgcgcagcgcttccggttgctcgcgctccaccacttccgggatcaccggcatgttgtagcgctctttgtacgccacgcctgaggcggcgagatccacattcaccctgtccatttcctctttggacagctcggccagattgtaacccacgctatgctccttacttactttgccgcattgaatctgcgcagaaggtaatccacccggcggcgcttggcaagcccattacgccgttgccgggagcgatatttatccgagagtaatgcaatctatttattcttttaaataagaatgattcgctttttgattaaaataaaagatgaaaataattatcatgtgaattctcaacgtggggttgatattttaatttattgatatttatgatttttataattaatgtttgcttggtgtgaataatgtgtttttatttttacggcagcaaggcataatgcgcggaaattaaattcatgacctgcaaaataaaaggaatcattatgctgacgcaagaaatgactcaaaagctgaatgagcaactgaatctggagttctactccgccaacctgtatctgcagatgagcgcatggtgcagcgataaaggctttgaaggcgccgccgcatttcttaaagagcattctcaggaagagatgcagcatatgcaacgtttgttcgactatctgagcgacaccggctctctgccgctgctgggcaccatcgccgcgccgccggtggcgtttgagtcgctggcggacgtgttccagcagacctacgaacacgaacagctgatcactcgtcagatcaacgaactggcgcacgccgccatgaccgcacacgattactccaccttcaacttcctgcagtggtacgtggcggagcagcatgaagaagagaaactgttcaaatccgtgctggacaagctggcgctggtgggcaccagcggcaagggcctgttcttcatcgacaaagatctgaagaaaatgggcgcgatgggccagggcggcaacgaccaggcctgatctgcaccagagcatcgaaaaaccgcgcgcgggcgagcctgacgcgcggttttttttaccctgcgtttatcgcggttatgcggcgatacgtgctgccggatcgcaaaatgccagtgatgcgctcgacttgccgcggcgtggtcgttatgatttaccgcgatacgctacagggatggtagagtcaaaacagcgggttagccgatacaacccgtttttctgtttacccgtggcgcaatcattgcggtgggttggggccgctgatacatcgccttggctgtggccttaacccttatgaccctctttatattgttaagggataccactgtgatcggtaaaattcgttcctcttgtcgcctgctttccaccgttttcgttctgttcgtttgcctgtcttcgcagcaagcgctggcgcacgcccacctgaaagtggaaacgccgaaggctgacgccagcgtcagcccggcgccgaaggcgctgaccctcagcttctccgaaggcatcgaaccaaacttcagcggcgtgaaaatcaccggcccggacaacgccgtggtgaaaaccggcaagctgcagctcgatccgaacaacaacactcaggtcaacgtgccgattgaaggcgagctgagcgcgggcaaatacaacgtcagctggcatgtggtgtcggtcgacgggcataaaaccaaaggccagtacagcttcaccgtaaactgatcgtgactctggcgaccctgttcgttctgtgtcgcttggtgcactttgcggcggtgatgctgatgttcggcatcagtctgttcaccgccttattggcaccgcagcgcctctccccgatcctctcccgcgatgtgcgtccgctactgcttgccggcacctggattgccgggctttccgccgtggcgctgctggccattcaggccgggcagatgggcgacggttggcaagacgcctggcggctggaggtctggtgggcggtgctcggcaccaccttcggcgaagtgtggcgctggcatctgggcctgtcgctgctggcgatcctgagcctgctggtgccggaacggccgcgcgcgcaggcgttggcgctgtgctcggcgctgctgctggtgagcctggcgttcatcggccacgcggcgatgcatgaaggcgcgctgggcgcgctgcaccgcgccaatcatgcggtgcacctgctggccgccggttactggttcggcagcctggcgccgctgctggtttgcctgcgttacctgcagccgccgcagtggcgcagcgacgccatcaccacgctgatccgtttctcgcgctgggggcacctggcggtggcggcggtgatcgtcaccggcatcgtcaacagcctgattattctcggcggctggccgcttaatctcggctccccttatcagcgcctgctgctgatcaaaaccgcgctggtggcgctgatggtgatggtggcattggccaatcgctacgccatcgtgccggcgatgagccgcgtaccggcgctggcgcagcgcggtgtggtgctggcctgctggctcgaagtcgggctggggatggcggtgctgctgctggtcagtttatttgcaacctatgcgccggtatgacatttcagcttgccgcaaccggccaagctgcgggaaaatcggcgcgaatagcaaccttaaggccatcacatgaaatcggtattactcggcattacgctgctggcaaccgcgaccggcgcgctggcggcagacaaactggtgaacatcaccaaactggagtacggcaaacagtgggcgttcaccaaggaagaggtgacgctgcagtgccgcagcggcggcgcgctgttcgtgctgaataacagcaccctgatgcaatatccgctcaacgacgcggcggagcagcaggtgaagaagggccatcagcgcgcgcagccgctggaggtgatcctgctggacgaccctgccgaaccggggaaaaaaatgagcatggcgccgtttatcgaacgcgccgagaagctgtgcgctgactaaccgcttgtttgccaacgccttgcccagcgcgcgcagattgatgcgcatttgccgcatagttatttcgtcacgaaactatcacgcggccgccgggcggctggcaaaactggcgcggtaggctactcttaaagtgcacggctgaacaagccctgcattaaatgccaacttttagcgcacggctctctcccaagagccatttccctagaccgaatataggaatcgtattcggtctttttttgagttgttgattttaaaggatttattttcgtttgtccgaaaatgtccgaaatatgtccgaattttgatattcggtcttttacagcatcacgtactctttccccctcgttttaagatatttcagcgtcatcatttccgttgtatgccccagcagcttttgagcaaatgccttatcgttctgcttttcgtacaggcggccggacaggcttcggatctcgtggaacgtcggcgggctttcctgaaattccaaacctgatgctttccgcgcggcgacaaattttttcgttaacccgtcgggatggatcgaaccatcttggctatttttcctgatgccggcgctgatcatgaagtctgtcgtgctgaccaatcggcattgatcgataacggtgccaagccgcaggcccatacatttcagttcaagatcaagggggagggagagcaaagcccccgttttgccttgttcaacctgcaggcgcccgtcaacgatatggctaaagcgcatttgtgtcagatcctcgcggcgttggccggagaccagcgcgagatccatcgccaggcagaaccacggcggcattgtctccgcagcatctcgaatcggcccgtattgcttcagctccagacgttcgcgcttcacgatagctttcgccgcgcgggtcggggtcacagggttgttttcgatgtggccttccacgatcgcctcgcgaaaaatatcagacagcaccgatcgcatggttgcggccattgtctttttgttctgggcgatccaaaactcgagaaattcggcgatgtggcgtgtcgtgatttttgtcagcaccatgtcgcccaggcgttcccggataatggcaatttggccggtgcgcactttgtatgtgttctcggccagttctcggcgcttgaataggacatcgtaccgatcgagccaggcgtttagcgtgtattcgtggctgcccttgattttctccaggagcagaatgggagagtagttttgctcgatatagtggttggcttcaatcgcctgggcgatagcctcgcgtcgcgaaatctgaccgagagagatctccttttttgtgactggattgcgccagtagaacgcgttccggtttcggcggaatgtcaggtttttcggtaagcgcatgtcataaccctcccttcgccgtgccattgatcactttctccatgaacgcgagcctcgcgggatttgggctctgcgcttcctttatttttctccccaggttgaagtccttggggttgatgtaaatagtccctggtgtcagtcggtactgcttgccgtgcttctccgccggcgggtaaaagtttccgttgcgcgcccagcgccagagggtctggatgcttggttttttatcggtgtagttatcatctcgccattcttcgagagtcatccatttagccattggtcatgcctcactactcagcacaaccggccacaatattagccgtggccggcgttgtgcgttgattttccaaaatcagccctgaaactctgggcgcatatcgtcgagcgcaagctggaaacgctccatgtcatcggcgcttagatctcgctctgaccgtcgcaccagcgcctctaccgcggcgaactcctcggcgctccggcagtctttcagctggctgctgatgctgccgcatgcggtgatctgccggtggcgcttaatcactttgtttttcagctcggtgtaagcggcgatccccagcttttgacgtaactcttcaacctgtgcgcggatatttgaggcttggtctgttgtttctgcctgatcgatagctgtccgaatgccgccggcaatatcatccgtatcgacaggcggggcgctctgctgtacgggtgcggcggcaggtccgtccgcaagctggctcacactgacgcgcgaggtgccgcgctgcgggttaatttcgcgttcttccgtcttttccaactcgtcaatcgtgtagacgccgagaatcacttccgggcagtacaggcgcgcccagcgcttcactgccagataggccagttgttggcgcggatcatcagcccaaagcgtagagttgcgggtgcgggcctgcgccagcatgagtactaactcccgcggtttatcctcccccctcagcgttgcccagacgcggatcccgatcccttcttcatcagccaggcgccagccaggaatgcgatactcccctttatcccctttacgaatatcaaatttgccgatcaccttttcccacggaccgaaccagtcatagttgatgcggtcgaccagcggcccgcgggtggaaatcactgcattaaccagttgcgcctcgtacccgagaacgccgctcacgatgaacgttttctgagccaccgcgaaggggttcatttgccactgggcggcctgcatggcgatcgccatgcagtcggccgggttccctcgcagatgggcggggatcgtcgctgtaccgctcgccatgacctgcgcaaattggttgatagcggtcaggtattgcgggttgaacagcgcgatgttcgagtcagtgaccgatgccgttttttcttcaggaatgctgatattgctcatattgtttttgccccttacgcaacgcgcagcgcttccatgcggcgctggtcatagtcgtttaagtcgtcgacgatctcttcggtgatcggtgccggccaggtgtcggtgtcgaatgcgtttttgatgtcgcgcagcgcctttttgtactcaagccggccaagctcaagcaggtcaggagaagcctcgacgatagccacccagtgatagccctcgtctttgttgacgaagatccagaagaactggtcaaaggcggcgatgtcgctatacatggcagcgctgaggtggtagtcccgatcgataatttcccggtgcagcttggcgcgcagcgcgtcttgcttcacacggcccatgctgactgatttcaaatccacaccgacgcgcacgctgttaagatcgatctcaaggtcagggcggacgcgaacctcgaggccggtttcctcatcaaagccgaaataacttgcttcaaccgcacgctgctcatgctgcagtagcggacccgctgaaggatgggtaaacagcgcacgctgaatggctttggcgtgttgcatttgctgctgggttaccagctgacggccgtcatcagagtttttccaggcatcgagcagttcgtcggcaaaaatggctgttggcagaatcgttttgatgcgcgccgccatgtcttctttgttcccgctgaccgacagcggagccgggatcgcagcttcacgagccgcaaactcaggatcgatgattgccagctgctcgagtagcgcatcgcggccaccgctgaccttaagcggttcaggcagcgtgctgttgtactctttgatgcaggctttcatggctgtagcagtgaatttctggccgtcaggaatggtctggaattccggcggcagcagggagtaaattcggcctatttcgtccgcattaccgcccagcgcgtaaggtgttggcagcttcgcgttgtgttcatcaatgacggtgcgcagagtgtccgtatccgccattttcggcagcgtttcattgtgttgttcaataaaagcgcgcattgaggctgtattcgtgaaagcgccttccgggataatcggctctacgttgaaatctcgctcgagattctctggctcaagcgccagcgtgtgcaccagcgagccgaacgtcagcgcgtcgctgcgttctcggccgatcgttttgatgacgtggcggccgtggtagtacatcaggctgatgcgtgcatctttcacttgggtgctgctgatgccgtttgccgcgtgataggcagcattcgaaatatcagcgtaacggcctggctcgaaatatgccggctgtagattccctgcaggctcactttccggctgcagcgccacctcagctttttcaccgtcgtttgaggtgtcattgcatgtctgctctggcatcggctgctgctcggtatcttcgctcggctcgctatcaacctgtactgcagccagcggggaggcctcgaaaagagtggacacatcgaagcggccaccgcctaagctgacaagctctggctctggctctggctctggctctggctctggctctggctctggctctggctctgcaaccaaatgcacggcatccggcgccgctccgaattcatagacgccatgctcagacaaatatttctcaatccagccgcggagtgtggcggggaagtggtacatatcagacgatggaacattgcggaccacgccgaaaattgtctcacggctgtattttaggatgttcggggcagcgcgtagcgccattgaccaacgcttaaagtcctcgtcatcgttttttatttttttctgcgcccagcgatcgatctcaccggcgatattttggcagtcgacatcaccgacccacagtgcgcaggcgatctcacggtcaagggcgtcatgcgtttgggtatagccgcgcttatgtacggttttcgtcgtttctgcttccggctccggggccggtttcagcaactgctcaacgtacttgcgaatgttgatgaaagtcgattcaggatcggtttcttcatagcgacgcgcgaccccggcaacgaaagccgcgaaacgctcaggatccatgcaggaaacggctggcaggcgaagagcctgcagcatatcggcaatataagcggattcgccgctcaatgcggtgttgattacattggtcatctggggttttgtcagcacagtgtcgatcacctcgaagccgtgcaggatgacggcgacagcccgtgtgtcagcgctcatttttgcgaagtaagcgcgcggctcttggccgtgggctggctccccgccgtcattggtcgtctggtctacctgtggcttttggctgctgctggtttctgccgcaccagcatcacttgcaggtttgtgctgctcctgcacttgttcgcgctcagttgcagggatgacctgccaggacaggttatcgtccagcttgtagcgcaggcaccaggtatcacagaacgccgcttctggcggcagatcgtcaacaacggggtaattggttcgtaccggcttgaagtaagcggattgatccagctcggcgtcctcgatatggttttcgaggtcacgctttgcccgcgcatcgttctttgcttcaaaccagatgaaaagcgagggtttccctgacttttgctttgcccttaagtgataggcgtagacgttttgcattgtgcaattctcctgagttttaggtagaatgcaggccgatcggtgctgcatcctcgatgtggtcattggtcatgcctcggctgttagggttggtcccctggcagcccgtcaccgggacgttaagccggtagactggcccgccttgtgcgggcctttttacttttaatcgcaataactcattcggcagtgcggacaatcaataatgtgggtgctcgctgccttttctacggaaattcctgaaacaaagtcgccgtgtttattctcaactggaacataaacatctttgttgcaacggtaacaaatcccgtcaattggcgagaaattcggaaggcggttgtcattgcaatattggctctgagcctcaattgctaattcagtgttgaaagtttgcattatataaaccctctctttggtgatattgaaatacgccctgcgagttgacgcccgccaccaggtggaggaaacgccgggcgcatttcaatacggccggttacccggcctgatttaattacctgttttcttctgggagataatcggccaaatcaaggcgacaacaccgattactaaaacaccgtcagccaacatcgacataattcgactggtaaaatcgacggcaacaaccaaaaataacaggacgataactgcaagccaccgcagcttttccatcagatatattgatccagtggcagctgcagggcttgggcgatctttttcagcgccgcttcttcttcttcaccgatcccgtcttgatcagcaatatccaggcacaagcacagcacatcaacggcatccgccgtgccggcaacatcggccagttcacgcatagcttgcgcgttagcgctgcgtggtgaggcctcatagcgtgcgcgaatgttgctgctcatctgggcaatctcaccggcaaacggcgcaaaggcggggagtgcactgatggttttttccagtacggcgatctctttggcgtcgcaggtgccgtcggcatatgcgatggaataggcgccccagacagtggcctcgactgcgtcgcggttttccatttttttcacttcaacaactgctttgcgggctttctttttgaacattccgaacatgttatttctccagttggttggctttgtgaaatgcatttattaatgcacttcaaaaagccccgccatcgctggcggggaagactacacacagcaattaatgtcgggttgcgttactaaaaattgaagcaaggaataattttgctaacattcccattggattatcgttatcgatcatgatgcaattatcaccgagatttaaatgagactttaacgcagcattagtagcgtgctcttgacagcaaaactcaccaagagtttcgccattaggcttaactacagaaactggtgtgtcttcatttttctcattgataaccaaataccccatattttccccgccagtcgtcatggaaaaaatatcatcatgaattctttttacatggatgcttactgaatgtgatttcatggtcatgcctcataaggttaattaaatgggttgccggttacgtttccggcgccagaatatggccgttccctggtgtgctgattaattcacaacgcggtcgtgcagttcttcgacgcgcttgctcattgtgcccagctgctccttggtgccgttcaatgcatgagacagggcatgacccatcacctcattgaaggttggctctttggccttcggtttggattgctccgccagcagcttaatctggctctgcatggtttcggctgcacgcagaacggcagtaccggacacgttctcgactttggttcccggcgcctgcagctggagctgcaccagcttcgcgcgcttcactacttcggcgatcactgccgggatagtgccggccagcaggtcggcagcggggcggagatctgcgtcggccgaaatggtgtctttgccatacaggcggatcaggcgctcaacggcctcggcatccggcggcgtcacgttaatgatggcgtccagtcggcccgggcggagcatcgcagggttgatgttctccaggtggttcgtggtcaacacggttatgatattgtttgccttggtgtcgataccatcgaggatgttcaaaatgtcatccatagcgacggagcgctcaccgctgacagcacggtcgatgtcttcacagaaaatcacgcaggccgtttcctgatactgcttggcgaactcaatcgcgtcagccagctcgtcggagcgcggcacgtacagatatgtgacgccgttgtcggttgccaaacgcgaagctacggtcgcagccatcgttttaccggtgccgtatggcccgcccagcagcacgccgcgtttcaccggaatgtcgttcgcgatgcagtcggtaatgcgctcgatcggcgtgaagaggttggtttcgatcgcttcggtcacttcacgggaataaaccagcatgtcgcggctaatggacgacgtgtccaagaacttcggttctggcatttcgatcaggtcgccgtcgtcatcgcggaagcgaattttgatggccttaccggcatagatggagccacgtttcaggatgttggcgatatcgtcaaacagctctttgatgacgctttcgtccttacgctgaatttttgctgctgtcacaaagcagatgcggccgtcttttcgatccgaatcagtctgaacgaaaccatcgatgccaggcaggctgaaacgtccccacggaatttctttggtttggttcggcccgacttcaatgttgatcatcgctggcggttggctaccaaaaaagcccggagttgactcggccgctgcccagccgaaacggttggttaatgcctgtgccaatgcgtttgcgccgtcccacgggaacacgttaaattcgcggcggatgatcactttctcgctcaggtaatcacggcggcgctccagcaaatcgatcgcatcctgaacgcccataccgacaggaatagtcagtttttcgccgtggtgaacaacttcggcaacgtgaacctgcttttctacttcattcagtgacttagacatcatttgttcctctgtggttatgtcagaacaccccgttctgactttggtcatgccgtgtttggtcctgcccattaattcgggcattttttactgctgtttcaggtggtgctttagtgcgtgccggctggctcgaattccggcgggatccgcagggattcaaaagggcgcttgatggcccgtagattgccgaccggttcgaaccggtagcggccgcggatgtaatcgaacgatgctacccacggcgcgccggtgcgcgagttgcggaggctgacggccttaccgctgtttgggacgatcttggtcatggtcacgcctccctaaatcagtgctgcggtagtgatgacgctggccaaaaaaacgaggcaggcgccgacaacaatcaaaaaccagaaacctctgttgctcatgattgcctcggtgcgccccttagggcgcaacaggtttactttccaatcagaagaagcatgtcttctgcagtaattgccgtcagtgcctcttcataccgatcttgtgcatcatcaagggtttcgatgctctcagcgtgatgttttgcatgaaccaagtttttggccgcttcttcaagtcttttacgaacatcctgtaaacgtgttgtttcgcccatcgtattgccctctgctgtgtggtctgttggtcatgcctcggtgctgtctttccagctgtcagaacgtttttcacctgctgcgttagcgaatcatcccggtcttcgtgcgccccgggcggctacttcgtgggcttcctgcctgttcgccgctgcttgatgtaattgattaagccaaagacttaggctcatgtcaagtctttggcttaataaatgcttaagtcataggcttatactgatcagttaagtcgtggggttaatgaaaggcacaaaaaaaccggctcgggccggttcggtggggaagtgattcaaaaaaaccggctcgatggccggtttagttttagaaaatcagttttgctacagtgagggctaggccggtagtgccgataattgttgctgctatccacttggtttgtttggatatctcttcgtggagatcagctttggtaacataattggacttgataacggcaatgtcggttaccagggtaaggacttggtcttcaagtttttttacacgatctaacatgtcattacctcctccattaccaccgccatgctgaaatgatgcactatcatcgctgaactgtccagcgactgactctggcgatgtccctctgatgtaggagatttttgaattactcattaatagctccctcatcaattatgttgaacaaaatttcttttgtatcaatggggtttccaaagtcgtagagcagatttatcaattggcacgtaaatgtgtatgtgccgtactcttttacatcaaaatagaaattcgccgacaggaacgacgttttccattcgggatgaatttcacatgagggaaggccggccataccattggatgtcacaacggtttcacctgagggatcaaccaagatgaaggtaaccaaatagttctcttcttggttaagttccaagaatgaaacccccatactcatggctaaccgtccattcttaaccatgaagtttagagtgggcgaatttgcaccatgactattaaatcttgcagggaaaataaaggctatttttccccttgcttcttcacgtggtcttgtattcattcgtcaccaaccggcttataccgcccgcgcagatacttctcaacgtaatcatcgatctcttttagtcgagcactgaatacagccatcatatttttttgttctacttcaggtaactgcctgtatagcttcagcaactccatttcatcttggttcagtccgctgctttcttcgacattatcaccaagtaaccatgcaactgatacgccagtagcttctgcaattgctatggcagatttcttgctgataactccttttttaaaccaaccattaactgactgaggagtgacgtcagcgatcctggccatctctgacttagagaagccccgcttggtgagttcggtaaggcgctcaaacaaggttgagtcggcgaaatttttttctttcattgcaacatgataagccttttgcttaaacaattgaatcagccaaaggcttgacttgttattaagtctttggcttaatcatctcacttctagaccggagagaattatgagtggtttaactaaagcaattcagatagcgggaacagcatccaacctggctgctctattaggcattaaacctatgtcagttagccgttggaaaactcgttacaaaggggcagtccctgcggatcgcgtactgcaaatttataacgtaacaggtgtcactccccacgagttaaggcccgacctttaccccaacccaacagacggtttaccgccagaacagcaggataccaagcctgcagcctaaggacatgatttatggaaatcaaacacgagcaggtccgcgacgcgctgcgcggatgggccacggaggccactcagcgcacggtcgcggcggaaatcacccgcgcttacttcaagttggaaatgcaggcgccgcagctggcgcagatagaacgcgccgacggcagcgttgatgatgctgcatggcacaacaacaagcagcagatctttcgctggctcgacagcgatagtgctggcgcccgccagaaaatccaggaactgcagccggcgatccttgctgcgctgccggcggtgctgcgcgcccggctggtggcggggaacagcatcgaatacctggcaatccgcgcgctgaaggaacaccaggaggcgatcgccgccgcgctgctgcacgcatcaccggcagattttgaaagagagtgcgacgaagcagagcgcagcttctacgagctgcggcgagcttacagcgcactgcattaaccgaggcatgaccaatgaccattaatcacgacgatttcctgcagaagcagatcaccgcgcgtgtcagggcgccatgtggggcgccagtaatctggtaatgaaatttaatctaagcaaaggcagcgccaatggctcgtattcgtaccgtaaaaccagaattttggaccgacgagaaggtggtggaatgttccatcgcagcccgattgctgttcattggattgttcaatttcgccaatgataagggctgtctggagcgttcgcctcggcgtatcaaaatgcaggttttcccggcggatccgatggattgtgaaccgctaatccaagagctaattactcatgggttactcactgaatactcagtgaatgatgtgcagtatttgcacatttcaggatttttaaagcaccaaaaaataaaccgtcccagcaaaacaagcatccctatgcctcccggattcaatgagaactcagtgagccatcacggacaagtcactgacggaaaggaagggaagggaaaggatctaaaagataaaaccctctctctatcgggagcgggcgaaatttcaccagatggacagggagcagggccgacaccctgggaagaccaagacgacgagaacccatgcggaaaatttccgatgagcgccaactgggcgccgacggttgatttccagcgattggcggcgttgtggggccgaattatcgacggcccggcgccaggatataccccgcaggagctggcgagcttccaggcgtactggaaagccgagggcagggtatttaaccagacgcagtgggagcagaaattcgccgacagcgtgctctacgagcgccaggcggcggccaaacgaaagcagcatgcaggaggttcaaatgcgaccagatacaccgcagcagccgctaccgctcagcagcaggtcagggccgcacgaaacgcagaacgggagcgacagggcttggctcctctgggagacgatggcggggatctacgccaaccgctgggtgaccaagaacggggtggcaccatccacgatctggggccagacgatttcgaaattctccgatgaccaactggcctacgccgcgcgccggtgcatggagcgctgcagcgccggtaaccactggccgcctgatcttgcggaatttactgcgatcgtcggcgagtgcacggccaacccgttcggcttgtcggcggacgacgtcatgaccgaataccggcgttggcgcaacgaatcttggcgtttcgacggcgcagatagtttcgactggcgccacccggtgctgttccagatttgcccggagctccgccgcgccggcgtagagcgcaagctgggacacaacgaactcgccgcactggccggccggctgctggcgaagtgggcaaagcaggtggaaatgggattctccatcccgccagtgcgaaaaacgaaagcgctggagaacaggccgccgggggacgcacaagtcgctgacacggacggacgctatcagcgcaagggcatggaaatgctggcacggatccgcgccagcatgggtaacaacaacgtgaaataaccgaggcatgaccaatgaccagaatcactacacggcagtttgtcgaacttatccagggcaaaaatctctcgactgcagagatcagcgccctaacgcatgaaaaacacccagggaacagcatgacacgatcgcagatctgcattcggctgaaatcgatgctccggtcgccaaacgtgaacatgatccggaccgggcaggggaacaaggcgcgctatcacgtgataggcgtgaatgagcgtttctacgagctgggggaagttaatttccggccagccgggcagaaaaccaggccggacaaaacgctatggcacttcaacccggtagaactgcggttttgccacatgcacaaaatgtttgatcaggcgctggctggcgttcgtgggagggcttgctgatgttcggtttattcctgctcgtttgctacacctaccagccgtgcgattacgttccgcaggggtgggtatatcccgatcgctccaactgcctcgaagatattcggcagcagtccctcccggcgcagtatgagtgtttgccggttgatggggtaatttcagctgctcgtcgccttgacaaggataggggggcggagcggtgatctggtggctaatttttgcgtttctgtttgccattggcgccggcgtagttggcttgtgtttcagggccattgttggtgtttgcttcgctgacgatgctggcgaccacccggagcgccgcaattacgactaattcttaaacccgctccggcgggtttttgttttgctgcacaccacacaatttactgtttatatatacagtattttggtgtaataattaaaacacgaagtgaatccgagaatgtcggagaagaatataatggatgtaaaacaagatgttgctcatattttgcccgagaatggtcgggcgctggtttacatgacccacggggcgataactgcggttttaccgctgaaggagagccagatcgtcgccgatactgagctcatgattgtgctgctccgacgtatgggctacgacgtccggagaaagtgatataatcctctcatcagcctgaacagctgatcacctgctgcgccaccacggagacgaaaatggcgcagtattcgttttacaaatcccaaggcgggatcctcgtgccggcaacgcccgacacggccgatttcgtcacgaacaaactcaagctgggggcggtcgtcactggcgagtttaagcgcgcccggaatcccggactgcaccgcaaatttttctcactcctgaatctcggttttgaatactggaccccgactggcggcgcagtatcaacgtttgagcgccaatttctccgcgggtatatcaatcgcctggcgcgccatgttgacgatgctggcgtgttctatgcgctggcggacgaatacctgcagctggtggccgagaagcgcgccgaacggctgacgattgcaaaatccttccacgctttccgccgatgggtaaccgtcgaagcggggcattatgatctttttgaactccccgacggttcgactctgcgcgagccgcgatcgatctcattcgcaaaaatggacgacctcgaatttaacgacctgtaccaggcagcgcttaacgtgttgtggaccttcatcttaaacaaatccttcccaaccatcgccgaggcagagaacgccgcggctcagcttatggattatgcagcatgagcaaactgacagacgaggcccgcggccgtgattgccaaatcaggatccccggcatctgtaaccgaaacccagaaacaaccgtcaccgcacattatcggctggccggcacctgcggcacggcaataaagccagacgacacacaggcagcgtgggcctgcagcgcttgccacgatgaagtagaccgacgcacgcgctttatcgacgccaacgacgcccgactgatgcacgccgaaggcgtcatgcgcacgcaagaaattttgagaaaggaaggaaagctatgatctaccccgacaacatcggtaaaggcaacggcaaagagctgcatttgcgtgcattggagcgcgtttggatacaagggcggctgaaaatgtggggccggtggtcagggatggaaagtttcggcagggccggcaacatgtttaaccgacttctgacgagcaacaaggtgacaaaagcggcgatcacccaggcgctcaatcagctgaaaaaggcgggatgcgagcaagaagaattgcgccagtatttgctcgacattctggagggaaaacaaaaaagcagcctggcattttgcactgattcggaggcggcgattatggatcgtgtgatcggggccgttctgctggattacccaggactgaaatttatcattcagcagcgctatatcgggaaaggaaaaagcctgaaggagatggccgcagacttgcatgattaccgccctgattggtgtatgcgcacctgcgagacgcgcgtcgcggtgtgggtgaaaacggccgaattcatgctttaccgtccgatgagtgatgcatttgagatgaatagcgagcgattttatcgttgactttgcgcggaaattgattaaattgatataagcttcgcgaagttatatccgcagcgacaaattcaaaagaaacccgccatcgagcgggtttttcattcgaagcgcaagacgtgctttaaacctggaggagggtttagcatgtttgatcctgaagtttgtcagcccgctcgtttcattaaatttaatagcttagatacgagtggaaagtttttctctcttatttgccgcgtctaccttgcaaagaacgctgatcctgatggaatgattcatgtgaactatgaaggattttgcggaggttaccctggtgaaaacttcttgttaaagctatcggattcattgcaagaggctagtgataagcccggtgtttgtatcccacaccgtcttagagaaattcttttagaatcgaatttaattaaatgacaaattcataactgattattggtggcccgcttaatgcgggctttttcatttttacgttctgatgggcgccccggagagttgccgctccccgaggcagtatgcccgcgtcaacagtcacgagcacacccctctattggagtgccgagacattgaaaaatcattcaaatgctgttgtgtcacgcgccagcggaaagcccgcgccgatcgtctatgctggcgaaaccgtcggttatggatgtgacgatctccacgtcgcaacgatccccgtttggcttgcccgcctggtgatcagccattttcactacagcaagcgcgtagtgaataactcctatctgcaccttgggattttcgacggccgcgaactggtgggcgtcatgcagtggggctacgcaatgaacccgagcagcggggcgcgcgtcgtgaccggcaccggcaaccgcgaatacatggagttaaaccgcctctgggtgcatgatcggatgccgcgcaatactgaatcacgcgcaatcagctatgcgttgaaaactatcaagttgctctatcctgcggtggattgggtgcagacgttcgcagacgaacggtgcggccggttcggtgtagtatatcaggcgagcaatttcgattacgtcggcagccatcaaacgacgttctacgagcttgatggcgagtggtatcacaagatcgccatgacgacgaaagggcgcaaggctggcgcccgcggtaatttcctccaggagaatgcacaccgcgccactgcccatacgttcaaccaattccgctatatccgctttttgaacaagcgggcgcgccggcggcttaacacgaaattgttcagcccgaagccgtatcctaaacccgaaatttcaccctagcccggctgccgtcgggctttttcatttctgcactgcccgccgcggcccgcggaggtggggatcatgaaaatgaacgacagctactcgaacgctacctattggcttgcgggcatatctgcctttttcgccgggttaacgctgcaggactggggtttcatcattggcctggctgtcagtatcgccctgggcatattgacctaccgcctcaatcggcgagagcagatgaaacgaacgcagatcctgcgcgacattttgagcaagaccaacagcgccaacccatcagccaccgcgacaatcgtcgcagaattgggccaaaaagctccgagagaaatctgatgaattccagcctgagaaataaaatcgtcgctgccataaccggtggcggcggggcgattgcgatcgccactgcaatgctcggcggccacgatgggttagagggccggcggtatgtggcctatcgcgacgttgtcggcgttctgacggtctgcgatggacataccggcgccgatattatcctcggcaagcgatacagcgacgcagaatgcgatgcgctgttgaaatctgacctgcagaaagtcgcacggattgtcgatcctgcgatcaaggtgaaaaccacggaaacccagcgcgccgctatttactcgttctcgtacaacgtcggcccgtatgcgtttatcggctccacgatgctgaaaaaattgaatgccggcgacccggccggcgcgtgcggtgaactgaagcgctggaagtatgccggcggcaaagagtggaaagggctgatcacccggcgtgaagtcgaaaacaccgtctgcacctggggccaatcatgaacggctggatgagcaagatcgccggcggcagcctggtgcttctgttgctggtggctatctgccttggcggttacagctcgctgttatcgcaccagttgcagctggcacgccagcaggccgcagaacagcagaagacgctggcacagcaggccgggctgatagctacgctgcagacgcaagatgcgcagaatcgcgcgctgatggcggcgcagcaacaacgcgagcagcagctgcgccagcagcacgacaccgcccaaaggaaataccgtgaagcgattaaaaacgatccctgcgctggtcagcctctgcctgccgctgtgcttgagctcttgcgcccggccaccggcacagcccccggcgccgttaatcctccttccccctgaatctgtattcactctatgtgagcagccagaaatggccggcgatacatggggcgacgccgtcagctatacgctggcactacaaacctcactgaaaatttgtgccggcagaattgccacgctgaatgcctggcgggccggattactggagaagacgagtgaaaaaaaatgatactgacgtgctggctgtcctgctggtgggcggcggcgccattgccattgtgatcggtctgggcttgctgttctcctggggcatgctggccgcgtggaatctgttggcgtcatccgctggctgggcgtccatcgtgccaattaactggggaacggtattcggcctgatgctggtgatcatcttcgtgcgccagttgctgcgccgcaaaaaagagtaatgcacccaaagcgccgagccgtcgccgttctcctgccttagccacgacccgggctcctcacggtgagcgagcgggagaaatcaaaaacggttaataccccgcgagctagggggcggtcatagcggaaacatcagccgtggtagaagaaacggtgtgacagccggagagacggtaagtaaacaactacttaataaagtataaaaattagtgttaaattaagatgtcacttatttacttagaggtaaaaatggcatcctggacttgtccatattgcggacagatagctactgagaaggcggttcctgcaaaagcagaatctatgatttttcgagaagatactcgatatggcacggctattatgatgacttccatcatagagatgtgccctaatgacgagtgtaaggagattgtggtttcatcagatctctcaaccgctaaaattgtggatgggaggtgggccccacaagagaggttagacgcttggaagttgcggcctcaagcagccgtaaaggtatttcctgattatatccctaaagcaatccttgatgattacaaagaggcttctcttatttgtcagttatcaccaaaagcttcagcaacactagcgagacgttgcctgcaagggatgatccgtgacttttggggtgttaaacctggtagattggttgatgaaatagaagcgatagaagacaaagttgatagtgatagttgggcggctattgactcaatcaggagcattggaaacattggggcacatatggaaaaagacatcgacttaattgtagatgttgaacctgatgaggccggattacttatacagcttattgaagtcttgctcaaagattggtatgtcgaaagagaagagcgcaagaaaaggacaaataagattgttgagcttgctaaagcaaagcaggcggaaagaaaggctgtcaaaaactagacccgccacggcgggttttttattgcccatcacagagcatctatctaggtgctgcgtaatgcgcaagcaaagccacaggcgacacccaccgatcactcagatcatggttgcccgtggctttttttattcacggagaacgttatggcaaaacaggattggggagccattcaaaagctgttcctcgccgaatacgccaaaaccaaaatctccccgaaagaatggtgtgaggctaacggctacaactacgccacagcacgccggcacataaaaatccctgcgcaagggaaagagaaaaaagcgcagaaaaaaatgcgcagtgcgcaagatgcgcaaattcccgaaaatcccgcgcccgttacacccggcgtttcagttgctggcggcgatgaggaggggaagggcaaagaaagcccaagccttttaaaaccacagcatgaacaatttgcgcagaacattgcgcaaggcatgccgcagaaagaggccgcgatttgcgcaggctacgcgccgacgaatgccgaatcgcaagcctcaatcctgatgagccggccggacgtaaaagcccgtgtgcaggaactgcgcaataacgctgcgctgttggtttccttcaatgccggccacctcgctgaactgtcgtataaatctgcgcagttggcgctgcagaataaaaaatttggtcaggtcgcgccgaacgtaaaaaacgccgcgcagctgaccggcatcgacatgagcacgaataaaaccgaggtgaatgtcgatctggcaggcctgagctacggcaaggtttgcatcgtgaccccggcgaactgcccgacggacgtgtgggctgctcacatggaaaagctgcgcgagggaaagccgacggcccagtcataattgacggcgttctgtacgcattcagcagtgactgggcgacagacgtcctttacgacgccccgatcggttccgtgcgctggcgctggacctacggcggccgcggcggtggtaaatcggtagagattgctcgcgcgctggttatccttggcgctatcgatccgatgatcattctctgtgcccgcgaattccagaactcaatcagcgattctgtgctggcgctgctggaggccgaaatctatgccctgggcctcaaccatttctacaccgtaaaaaataacgagatcaccgggcgcaacggcacccgattcacgttcaaagggctgcgcaccaacctgcaatccatcaaatcgatgtttggcatcaaaatttgttgggtagaggaagcgcagaccgtttcccaggatagctgggacgttctcggcccgacggtgcgcgccaataattccgaggtctgggtttcgtacaacccgcgggaagccactgacccgacctataccctgatgaagcgccacgaggtcgatccaccggacggcggcgtcatcattcgccaggtcaattatcccgataacgcgtttttcccagacgtgctccggcaggaaatggagtattgcaaacgcgttgactatgaagcctatgagcacatctggttagggctgccgaaggcgctcagcgaggcggttattttctcaggaaaatatcgcgtcgaggcatttcctgacgatctctatctgcaggccgaccggcttttctatggcgccgacttcggcttctcgcaggacccttccacgctgatccgctgcttcatcatcgggcgaaaactctacatcgaatacgaggcctacggcgtcggcgttgagcttgacgaaatgccgcagttttacgattcgatccccgaggctcgcaagtggccgatacatggagactgcagccgccccgaaacgatcagctacatggcgcggcaaggcttcaacattgacggcgccacgaaatgggccggcagcgttgaggacgggatcacctacctccgcggcttcgaagaaatcgtcatccatgagcgctgcaagcacatgatcgacgaggcccggctttattcctacaaaacagaccgcctcacgggtgaggtgttaccgatcgtcctcgacaaacacaaccactgctgggatgcagtgcgctactcgctggacggttatatcaccagctccgacggcctcggcacctgggcgcaattgggtagacaagacgcatgagccaaaaaaaagacggggtgcgcgcgtggttccgggacagttaccagaacttcacggcgcgcctggggcttcgcacgcccaatatgagcagcgacggcacctatcagccgaattggaccagccgcaaccgcctgcagatcgagaacgcctaccgcagctcctggctggtgggcgtggccgtggatgccgtcgctgatgacatgacccgcaaaggcatcacgatcaccggcggtttgaagcctgaagaaaaatccaagctggataacgcctgggaggagttggcgctctgggaccgactgaacgacacgattaagtggggccgactctatggcggcgcgatcggcgtcatcatgatcgacgggcaggacatgagctcgccgctgcgtgtggaaactgtcggcccgggtgcgttccgcggcgtgatggttctcgatcgctggatggttaccccgaccacgcaagagcgcgtcaccgacatggggcctgatttcgggacgcccaaattttatcaggtggtgacgacggccaccgggatccccccgtggaaaatccactacagccggatcattcgtttcgacggcgtcacgctgccttaccagcagatgctgaccgagaacgattgggggcaatcggtggttgagcgcatcttcgatcgtctgatggcattcgatagcgccaccaccggcgccgcgcaactggtctataaagcgcacctgcgaacctactcgataaaaggcctgcgttctgtgctgggcatggggcagaacactgctgcctacaaagggctgatggcccacatggacatgatccgtcagtaccaaagcatcgaagggatgacggtcatggatgccgaggacgaattcgcgacccacagctacacgttcgccggcctgtccgacgttctggcgcagttcggccagcaggtcgccggcgcggtaggaattccactggtgcgcctgttcggccagtcaccggccggattctcgaccggtgaaaccgacctctccaactactacgacaacgtcagcacacagcaggagcgccggctgcgccgcccgctgcataaagtcatgcaggtgctgcacatgtcgctgttcagccggccattaccggacgatttcgccttcgaatttaatccgctgtggcagatgagtgaacccgatcgcgccggcgtggctgtgaacacggttgaagcggtgacgaaagccgtcgacgccgggctgatgacgctaaaagccggcgcgcagcagttgaaggaatcgtcacggatcacgggcgtgggttcaaccatcaccgacgaggacatcgaaaatgcgcaggacatcgacccgccggcgttcgagggcaacgatctcgacccagacgccgaaggggctacagcgccagtacgcaacgcagctacgaaagatagcgcaggtggtcggggacatcgtctcgacttcttacgatggttccgataattccgtcatcctcatcaacacccgcctgacccgttacgccgaactgatcgccccctgggcggaatccgttgccttgaaaatgtttgatgccgtcgcgcgccgagaggcgacgcagtggcgccagatctcgcaggaaatttctgccgggctgcgtgttcagatggagagcacctcagcaggccaggtggcgcgcaatatcgttgaggaaaacatcaagctgatgaaatcgctgccgctgcatgctgctgaccgggtgagcgggatccacgcccgagccattgaggcgatgatcagcggcgagcgcagcaaagattttgccgctgaaattttccgaagcggcgatgttgcatggtcacgcgcgaagttgatcgccaggacggaaataggccgcgccacgcaggcgctgacgcaagcccgggcgaccgctattggctccgagggttacatctggcgaacggcacacgacggcgacgtcaggcactctcacgccaaaatggaaggcaaattcgtccgctggggtgacccgccgacgcttgacggcatgaccggccacgccggcgcgctgcctaactgccgctgttactgcgaagttgtcatcccggaaaaataacccatgaaatatttctttaatacccggctcggtaacacccgttacgagttagccgacggctccctattgtgcgaagccgtaccgatcgcgcgggttggctggcaggtctacaacgccgcagaactcgacgagatcgaacctgaccgcgatgacgaaatttccgtttatcgctcccccgaagaagttttccgcccggagacgatcgcctcattcgaggggatgactttcaccgttttacaccctgagcaaatggtcaacccgtcgaactggcgggagaacgcccacggccacgcgaccaatatccgccgcggcaccggcgaacagtcggatttgttgctggcagatctcgttgtgaaaagcagcgaagccatccaggcgatttatcagggcgtggatcaaatctcctgcgggtacgacgccgaatatcggcagacggccccggggaaagccgagcaatacgacattgtcggcaatcatgtcgcgctggttcctgccggccgcgcgggaatccgctgttcaattggagatagcagaacaatggcaactaaaaaaacgtggtttgattcgctgcgccgcgcgctgaaaaccaaagacaacgcggcgatcgaagaggccatgagtaatgcgccggccgaactcaccaccgatgatggcgagggcgggggcgatttgccgaaggccatcaacatcaacatcagcccgcaatacccactcccggataaggatcccgagatgggcggcggccagggcattaccaaagacggcgaggaggacgtgcctgcctgggcgcaagccattctcgcgcgcctggataaattggaaggcggcggcacgaacgacggcgaacccggcgacgatgacgacgaagaggaaaagaaaaaggcgaccaccgacgccggctatcagcaggcggtgatcgcccgggctgaattgctggttccggggatcaaactgcctgagggtggaaagctggcgacgtttaaacgcgaagtgctcgatgctgcattccgcacgcaaaaaggcgcacagatccttgtcccgttggtcggtgacaagcccgattttaaaaccatgccgaaagcgtcgctggatgccgcatttaccgcggccagtgaaatcgccaagcgcgccaaccagcccgcagcccagctgcgcaccttcgaccatcaaaaccgcaactcaccggcagcgctgaacaaagccttcgccgaatactggaaaaaataaggtaaaagccgatgactgcttacacgtaccggatgcctgcgggcatcgccggggctgtttcacgccctcatcacctcactgcagagcctgtcgcgctgaataacgccaaagcgttcggcgcttacggcctggcgggtaaagacgtcggcggctatttcgtgccgctggaagccggcgacgccgtcggcgtgatcctgggcttctacattcgcccgtacccaaccacctcgacgcctgatctggtccgccaggtgggcaccgataaaaacctcaccggcgaccgcctgcgccgcggctacatgaccgtgaatgtcggcgttgacgcatctggcattacaccgcatacgccggtgaatatccgcatcgccaatccgagcgcgacgagtccgcttggcgcgccagtggccgcagccgtggctgatgaaaccgtcgtcctgccgaccgcatttttcaccggccccggtgatgccgctggcaatgtcgaaatcgaatacaacatttaaggaaatcgctgattatgtcacttcatacctttgaccaggcgaccgtagacagcaccggcgcatttctgatcggcgagctggaacggctcgaccaagaactgaatatgccgctggtgggctatacgtggagccgcgatattgagctgcgcgaggacgtgtcgatcgctgacgacatttccagctttaccaacaccgagcttgcggcatccggcacgccaaacccgaacggcaaaaactggatcggcaagaactccaccgagatcgcgaccgttaatctcgacatcaacaaaaccggtttcccgctgaccctgtgggggatggaacttggctggactgttgtcgagctggctgccgcgcagcaggtcggccgcccggttgatgcccagaaattcgaaggcatgcaactgaagtggaacatggacaccgacgagcaggtttatcgcggcgatacgctgatcggcgtgaaaggcctggtgaactacaacggcgtgttgaccaccaacgccccgaaagtctggacggcctcaaccgctgacgaaattcgtcagtcgatcaactccgtactgtcggccgcctgggcaaactcgggttacacgatttgccctcgcgatttgctgctgccgccggatcagtttgcgctgctctccagcatcatcgtgtcctctgccggtaaccagtcgctgctgacctacctgcagaccaacaccatcgcctaccaccagaacggcgtcccgctgaacatccgcgcagtgaaatggctgaaaggtgcgggcgcagccggcaaggatcgcatggtggcctataccaacagcaaaaagttcgtgcgattcccaatggttccgctgcagaacatcccgattcagtatcgcggcatctaccagctgacaacgtactacggccgcctgggcgccgttgagtccccatatcgcgaaactctggcttacgtagacggcatctaaaaacagccccgcaaggggcttataggaaaagcaaatgaagcaatcactggtaaaaatccgcgtacatacgccgttctcatttacccatgccgattaccggcaggaggctttttctgctggtgttcactcggtggcaccggaggtggccgaaaactggttcacgcaggagcatgcggagatcgttgacggtagccaaccggaaaacaccggtgtgccagcggaggcgctggcgcagatcgccgacctgcagaagcagctggcggaggaaaaaagcaaagtagccgacctgacgacggaacgtgacgaacgcgatcagatcatcgccgagcacgtcgccaccatcggcaaatgcgatgacacgatcgccgacctgcagaagcagctggcggcggcgctgactgagggcgcgaaaggtggcaaaaaataaccatctgccgaccgtcgaaaaattccgcgaagatttcccgcagttcggcaacgccgtcacctttcccaacgctcaaattcaattccgcttaaatctggctgaccaactgctcgatgaaaacaatttcggcgaggtattcccgtacctggccgagctttttgtcgcgcattacatggcgctccaggcggcggataaccgggcggcggcgatcggtggtggtggcggggcgaatagcggcgttgtgtcgtcgaaatcggtcgacaaagtcagcgtgagctatgacagcagcgccacgatgaacccggacgcgggcttctggaacaacacccgctatggggccgaattctggcagctgatccagatgttcggcatgggagggcggcagctatgaaaagtgggttgaaggtacgggccgatcggtcgcaggccgttttttctgcgctgaatgaaatcgcgcgccgcgacgtgctggtcggcattcctgaggcggcatcggaccggcaaccggaagacggtgaaaagcccgggataggaaacgcacagatcggctacatcaacgagtacggatcgccagcgcagaacatcccgccgcgcccgcaccttcagcccggggtgaaatcggtgcatgccgagaccaccgccaaaatgaaggctgcggcgcaagcggtgtttgatggtcgcgccggcgctgcgactgcggcgctggagtcggccggcacgatcgcgagccaggcggttaaaagctacatgaccagcgccgattttacgccgctgtcgccagcaacgctaaaagcccgggcgagccgagggcgcaaaggtgcggctaaagaattgcagagccgggccgccggcaacgcgccggacaatgtcaacgctcgccccctgatcgatgaagggcaataccggcgcgcgatgacctacctcgtgagggataaaaatgccaactcttgacgttacagacgtgctttttgatcccgagttttgcgacacctccctgattgtcacccgcaaccagcagaccgtcgacgatgacggcttcgccaccaacgccccggtaaaaatgccgtttgccggagtggttaccgtcgatcggtcgctcgaagcgcggcgcatgatagcgggccaggtggtcaccggtgcaatcctgattgtgaccactgagcggctcaccgccgggcagacggcgcgcgacgcggacatcgtgacctatcagaaccgcgattaccgggtgaccttcgtcgacccttacacggcctacggtgcgggattcgttcaggcgcattgtgagctgctgccgttcgatggagggatccccgttgagcaataacaccagcacgcaggccggttacctgacgccaatttcgcccggccctgattatgatgaggcgctcgaacgtgcgctaaatcgttgggtgctcggtataaccgggctgccgccgggcaacgtgcggccgcgctggacacccacacagccaccattgatgccgccagatgtggactggtgcgccgtggggatctccggctttatcggtgatgataatccagcgtttacgcggcagaacgacgacagcgcggaattgtggcgccacgaggtgaccgagtgcctggcgtcgttctatgggccgcatagccagcgtatagcgtcaattttccgtgatggtttaacgctgtcacaaaataacgatcagttgatcgccgtcggcctgtcgcttggcagcattggcgacatcattcctttccctgaactcatcaataaccagtgggtgcgccggtatgacattaccgtccgcctgcgccgcaaagttgttcgcgaatacggcatcaagccgatcgcagaggcaacggtaaaattcttcggagaataattatggctcagcaggggttacctgttcgtaacgtcgtcggcgttgcgattaatatggccttgcgcgcggcgcaggctcgaaactttggttcgttgctgattatcggggcatcgccggtgattgacgccagcgagcggatgcgcgcttattccggcattaccggcgtgcaatctgacttcggcatccaggcgcctgaggcgttagccgctcaggtttactactggcagcgcccgcagccgatcgatctgtacgttggccgctgggtgaaagtggacactgccgccgcgttgcgcggggcaatcctgaatactgcgcaacaggcgatgaccaatttcaaaaccgtgaccgatggcgcgatgaaaatcagcgtcgatggaacggtcaaaacggtatccggcgttgacctgtcggcagagaccaacctgaacggcgtcgccgcgcgtgtggctgaaaagctgactgcggcgagtgtcgtctgggatgcgaacaacgcgcgctttgttgtgacgtcgaaaaccaccggcgaggcgtccgcagtcggcttcgctacgccaaatgccacgggaaccgacatttcctcgctgatgggcattcttgaaggcaccggagcgaaaattatcgcgcgccagccggcggaatccatcactgaatgcgtcgcgaaatttatcgacctgtcgtcgaaatggtatggcctgtatatcgccgagacgatttctgatgatgacgtgctcgcagttgccggcctgatccaatccgatgacgtttcccgtatctacgcccacaccacgcaaaataccgccgtgctcgatgcggacaataacaccgacattgccagccgcctgaaagctgccgcttttggcacaacctgcgtgcagtattccagccagagcccttacgccgcggtgtcgattctgggccgtgcctttacggtcaatttcgccggctggcgcacgacgatcaccatcaaatttaagcaagagccggggatcgtcgcggaaacgctgacacaaacccaggcgctgaccctgcagcagaaaaactgcaacgtgttcgtcaattacgacaacgacacggcaatcctgcaagaaggcgtgatgtgtaacgctgatttctttgacgagcgccacggcctggactggctacagaactacgttcagaccaactactacaaccgcctctataccagctcgacaaaggttcctcagaccgatgagggcattaccgatctgctgaccaacgtcgaagcatcgctggcacagggcgctgaaaacggcctgattgcgccaggcgtgtgggggggcgacggtttcggcgcgctgaataccggcgaaacgctgacaaaggggtattacgtctactccccgccgattgcacagcaggcgcaagcggagcgcgaagcccgcaaagccccggtgatgcaggtggcaatcaaactggccggcgccgtgcacttcggcgacgtcatcatcaacgttaaccgctaaggagctggtgaatgtcaacttatagctttttggatgtgtccgccaatatcaccggcgtgggcggttcgattgacctcggcaacggtgcagcgacttcagacgaggggattgtcgttgcaatgggcggcgacaaaaacacgatggtgaccggcgccgatggcgaggggatgcacagtctgcacgccgataaatcgggcacgatcaccgtcaacctactcaaaaccagcccgacaaacgccaagctgtcggtgatgtataacgcgcagtctttgtcatctgcgacctggggcaacaacgtcatcgtgatccgcaacaaatccagcaacgacgtgaccacggcgcgcggcgtcgcgttcaagaaattgccggattggcagaacgccaaagacggtaacaccgtcgcctgggtgttcgactgcatcaagatcgaccaactgctcggcacgttttaaggggtaatgcatggaatttgaaattaagggccaaaaataccgcgcggccaaactgaatgttttcgagcagttgaaagtttcccggaagctgctgccgctgctgtccggcctgctgggggaaattaaggtgttgcgccagctgaaaaccggacaggtgtcgattgaggatgcgctcaaagtggcgctaccggtgatcgcccaaacgctggcagacatcagcgacgatgacagcaacgcgattattcatccctgcctggcggtggtgtcacgccagaatggcaccgtctacacgtcgatctttaccagcggtcaactgatgttcgatgacatcgacatgatggacatgctgcagatcgtcgcgcgcgtggtcggggactcgttgggaaattttttgcccgcactccccgacagcgagacgaaagaccagccgccggcctgacgctggacgtcctgccgggcggcgaggattacctgttacgcccggtggatgccggcatgtgcagctttgaggcgctcaaggatgggcgcctcgatttgttcgacgtcgcgctgatgaatgattacctggacatgaaagcggataacgaagcccggatcgccaggtggagagaggatcaatgaacgctgaaaccatcaaggattttttgatttctctgggcttcgaaatcgactccaccggcgagcgaaaattctctgctgttgtcgccggcgtcacggcgaacgtgctcaaaatgggggcggcagtagaaggggctgcgctgacaatcgtcggttttaccacgcagatcgccaatggcctggataaagtctattttgcatcgcagcgcaccggcgcctcagtggcgggcattcgcgcgttgggatatgccgcctcgcagatgggcgcagacgcggccgctgcacagggctcgctggagagtctcgcgagattcatccgtaacaacccgggcgccgaaggtttcctgaaccgcctgggcgtgcagacgcgcggtgcgaacggtcagatgcgcgatgccgccgccatttttaccggtgtcggcgataagctgcgcaacatgccgtattaccgagcgaatcagtatgcgcagatgctggggatcgacgaaaacacgctcctcgccatgcgccgcggcattaacggttttactgccgattaccagagcatgctgaaagccaccggcctgaacgccgaccgcgcggcgcagcagtccaataaattcatgacctccatgcgcagcctgaccgcgttgcttggcatggcaaaagacaaaatcggctcagatctggccggcggcctgagtggctcactggatacgctgcgccggcgcatcatggacaatttcccgaagatagaggggttcatcaccaaaaccgttcgaggtgttctctggttagccgaggttttcgggcggatgctttaccgtggctatcaggctatcgatcaggtgatcatttggtggaaaagcctcgataccgaatcgcgcaaactgatcgggattttcggcgcgttgctggttgcctggcggctgctgaatagcgctttcctgatgtcgccgatagggatgatcactgcacttatcgtggggatcggcctactgtgggacgattaccgcacctggaaagaaggcggcaaaagtctcatcgattgggcgaagtgggaaccggctatcacccaggccaagaacgcgatgatttggctgcgtgacaagatgctcgaactgagagacgccgtcggcggctggaaaactgcgctggaaattttggccggtttcgtggctgtgacctgggcggcgaaaatggtcagtgcgatcggctccgtgactaaaagcgtcggtggcctgtcaaaagcgatgggcggcctgggcaaagtcggcgtgatcggcggcttgcttgcggtcgaagaggctgtcgttaaaccgctcgaggggaaatactcctggctgaccaacaaccccgtcgccaatttcctgaaccagctcccgggcagtgacacggtcgacgaatgggggcgcaaactgcttccgtggcgccgcggtgaatctacgcaatatggccagtcggtgcgccggccgcaggcgacaaaagcaggggcggcgctgttgggctggctgcagcccaaactgacgcagcttgaggcaatgtacaacctgccggcgggcctgctgcgcagcgttgcgctaaccgaatctggcggcaatcagtttgctgtttccggtgccggcgcgaaaggcttgttccagttcatgccaggcaccgcccgggacatggggctacgcggcgacgacgtcttcgacccatccaaatcagcggcggccgctgctcgctatctgggtatgctgctgcgcatgaatggcggtgatctggaaaaaacgctggcgtcctataactgggggatcggcaacgttcagaagcacggcatggggctgatgccggcggagacgcgcaactacataccgagagtgctcagcaacatgccaggcgccggcgggaatagcctgaatcagcagacggtgatcaatatccacggcgttaacgatcctgcccgcgcagggatggaagtcgccgatcgtcaaactggcgtgaactcccgcctgacccagcaactctatgcgaggccgcaataatggatattctctccgtcctgttttcgcagcagacccggaagatcggcggcatcatcccgagcgtggcaatctcggaaaaacacagcgacacgctggagatcaccgagcatccgatcgaagacggcgcaccggtcagcgaccacgcctacaagcggccgccggaggtgacgatggagctgggtttcgccggcggcggctcgctgctggatggcgtcgacacaacccagtttatcgacatcaacagcggccggacgctcagcagcggcccgcgggaagtttataagcagttgctcgcgctgcaggaaagccgcttgccgttcgacgtcaccaccggcaagcggcagtaccagaacatgctgatccgctcactggatgtcacgaccgatcgcaccagcgaaaacgtgctgatgtgtgtcctgacgctgcgcaacgtcatcatttcccgcacgcagagcgtttcggttgcggacaaagccaacatggccgacggcgtcagcacgtcggcggtgcagaactctggcactaaatcggccaagccggtcaacgaaagtttgctctcccaggcgcagcgcggcgcgctgggagtgctgggaggtttcgggtgaacattcaggaaattccgctgacgccggacaatcagcaattcgggatcgctctgggcggccagcagatgactatgcggctgacctggcgcgatgagtccggctggttgctcgacctcatggacagcgccggcggcgcactggtgaatagtgtgccgctggtacctggcgccaacctgctggcgcagcatgcgcacctagggtttaccggtgcgctgatcgtcatggtcgacaacaacgaaccagagctaccgacgaaaaccaacctcgggatcggcagtcatctttattttgtgcaggagtagggcatgagtcagaactggatgcggcattttgagctgcagctgcttgaccagcagggcaacggcatcagcttgtcagattttaaagtcactttccgcattgagtgggccgatacgcggtggccgcgcgtcgccaacgtcaaaatttacaacctgtcgcttgatacccaaaaccggattctgggcagcgagttttcaaaaatccgcatgattgccggctatgacgggatcgccccagatgcagacgccagtcaggtcggcgtagcgcggccggtagacccggcgaaatccggccagcgggacggccagaactttggtctgatttttgagggggatctgcgcttcacgatcaccggcaaagacaacccaaccgattcctgggtgctgattcaggccgtgggcgatcatgaggcgtttctctatgcgacggtgaacactacgctcgccgccggctataccgtggctgacgtgtacaatgccgccctgaaaagcttcaacgcctacggcatcacccaggggatcaccggaacttttcccgatacggtttttcctcgcgggctggcgctgttccaatccgcgcgcgatgtcatggactccgttgccggcatgtgtaaagcaacctggcagctgattgacggcaagctgcagatggtcaacgagaacaaatacattcacgaggctatcgtgctgaacagcgaaacagggctgatcggcatgcctcagcagacgatgggcgccggcgttaacgtgcgctgcctcatcaacccgaatcttcgcattaatggcctgatccagctcgatcaggcatcagtttaccgcgcagcactatccgacagtgagattgcccaatccggcggccgcatcagcgaaaccgaccagaacggaaatcgagttgtcgccggttccctgcagcagcccgccagcattgcgacggacggcgtgtatatcgtgaaagcgatcgactatactggcgacacacggggccaggcgtggtacatggatctgatgtgcttcgcgcgcggctcggcagatttgcaatcgagctctactttgctaaaaggacagtagaaaaaaccgatgaaaaaatacctgatgttgttagtcttcggctccttatatgcatcatccggttttgctgatgtacgctgtggtgattacactctaacggccagcaatgatggattcatgcacatcaacggtgtcagaccggaaacccagaaattcaccttccttgggcaaaaagaagactatgacaacgtcaagtacgaatggcgtgttgcaacgaaccagccgggaaaatggttaggtatggagtacgtgaagcggggcggcacgaagcgttttcttaacgttcagctgctccaggccagcatggatgcgccgcgtcagtatgcgacttatgattgcgtgaaggtgaagtagaagtagaagaacatgagaatctctggttgacgatgcgtctctacatgataaattactccgctcgctcaataaattctcacacaacatgtgaagttatagttaacttttgtgatggtttagcataggtgctcatggcggatggagttcattggttttcatggaacagatggtgctaacgaattctctattttgaataggaatttcaacgttagcgcaaaatgcgatgagtggctgggtactggagcctacttttttttggatggagtgggtaagcctgaagaacatgctgaggcttgggcaaaacttcaagcctatgatagtagcattcggggaaatcgatattcacggtttgtcgttattggtgctaaaatcaccgtaacaaatgtgctgcgcatggatactgaagaaggtcttgaagccttcaacgtatacagatcgtacataaaaactagaatggaagcagagcgccaaagtccatcgagaagccttatagtcaacgattgtattgtttttaatcacattcttgatgaaaccgagtttgaagcagtgataaactgtgaatatatcaagctggatgtatggtcaagagtcatgggctacggttctagaatacctaactgcagagtgatgagtgttaagaaaccaacagtgtctattgatgtcaatggattacatgtagcgaaaaggggtaaggtatgaagactcaaatgcaaattgtccaagaagccattgcacgcttggaactcatgagccgagaccaatttcgtgcctctttggtagcggctggcgctgtagaagctatggatgtacggatgcatttcaacgctagcatgtcgggaactgacagaactgagcaaactcagccaaaagactcagagtacagcttgagctttaaacagcgcggccagcatcgcgaactgtctcttgttttttaaggataaaaaatggattttcgcttggttagaatgctggttttaaatttaagcttttctgaagagaaggaaggcgatgaaaaggcggatagcagccttaatattgaagccgcaatgactttgagtgctgaggatagccgccttgctcgcatgacgacagacattactctgaactcgccagggcgttatagttttgaggcaaaaatagccttctttttcaagtttaatgatgatgttacatctgaacaggctgaggaaaaactgagaaaagcagaaactgaaaagttacttttcccatatatccagagttacttaacgaactttattatgtctgctggctacccgcgcccaggtatacctctagtcttgatgtaactatttacaactattaaaaaaacccgcttcggcgggtttttttatgggaaaaattcatgcccgtacccctcacatctcaaatcggtgataagcagcagaccgaccaggcgctgatcgacgccatcaacgcgggaatgcgcgtatcgatccccggcatcattcaatcctttgacccgggagatgagacaagagcgcctacatgcgtcgtgttgccatcagtgaagggttacgagccggacagtaccggcggcggtaattcctccagcctgccgctgctggtggatatcccagtcattttcccgcgtggcggcggcgtcacgctgacgtttccggttaaggcgggggatgagtgcctgcttgtgtttgccgaccgctgtatcgatttctggtggcagaacggcggggttcaggaaccggtagacggccgcatgcacgatctgtccgacgccttcgctatcgtcggcctacagtcttgtgccagaaaaatagcgaacatcagcaccagcgccgcgcagctgcgcaccgacgacggcgccgcatttatcgaactcgaccccagcagccacgcggtgaccgttaccacgccgggtaagctgaccgccagcgcgcagggcggcacggagatcaactcccccgaaattgtgctcaacggaaacgtgactatcaacggcaacctgtcgcagggcatgggtgacggtggcggcacggcgacaatgctggggccggtcaacgtgacgaacgatgtcaatgccgggggcatcagcctgcagacgcacaagcacggtggtgtagaaactggcggcggccagacgggaggcccgcagtgagataccgtaaagaagacaagaacggcgattacagtttcgggcgcggcgagggtgatttcttcattaacacgcccgaggctgtgggcatggctgttatcagccgcctgcagctgcgaaagggtgaatggttcctcgataccaccgccggcaccgactggacgcagatactcggcaaatacacgtcgggcctctatgacatcgtgatccgcgagcgcatcctcggcacgccgaacgtgaccgagatcgtcgagtaccagagccagcgcgatgttgatacgcgcgacctcctgatcaccgccacgttaaacaccgccttcggtcaaacctcggtaacaacctatgtatgaagacattatcgattcgatgctgccaaaaataacggcggcagggatgagcgcgcctgaattccagaccatcctcaccgggtggcagacgatttttcgcggcatctatggcgatgacatctacatcgagccagacagcaaagacggcgtgctgttgtcgctgatcgcatacgcgatgcacggcggcaacaatgcggcgatcgccacctggaatgcgtttagcccggcgaccggcacaggagcagggttggcgagtaacgtaaaaatcaatggcatcagccgaaaggcgccgtcaaattccacggttgacgtgaagctgatcggtcaggttggcatagtcatcagaaatgcctcagtacgcgacagcgccgggaacctctgggatttgccagcagaggtggaactcgacattcacggccaggcggtggtaacggcgacggcgcagaaggcaggtgccatcaccgcgctgcctggcgatgtttcgcaaatcgctacaccgacgcgcggctggcaatccgtcacgaatcctgaagcggccaccgccggcaaaccggtggaaactgatgccgagctgcgccagcggcaggcgctcagcgtcgcgctaccgtcacgaactgtcatggaggggctgataggtgccattgccaatatcaccggcgtgacgcgctataagggctacgacaacgatacttcggaaaccgacatcaacggcgtgccggcgcatgcggtttcgatggtggtagacggcggcgatgcagaagagatcgccaggatcatcgcgataaaaaaatcacctggcgcgccgacgttcggcactacgacggtgatcgtcaaagatgcctatggcacagacaagccgatccattttttccggccgaccaaagttccgatttacgccgctatcaaaattaaggtgcttcctggctacaccagcgacatcggcgaagacataaaaaaagccgtgtctgactacatcaacacgctttacatcggcgatacggtctatttttcgcggctctacgttcccgccacgctgggcaacgctgacagcggtaaaacctatgacctgatgacggtgagcattggcaaagatgcagtcacgatgagcgaggccaacattccgatcctgtttaacgagtctgcgacctgttcgccggagaatatcgcaattatcacggtggcatgatgaccaacaaatacaccgcattaatacccgcttatcactgccaattccccaactacttcgccaccgtcaatgcggttactgaggcgttcgtgcgccagcaggacagcacgcgcggtatcgtgccggcctttgacctcgacaacgccatcggcgctcagctcgatgttatcggtctgtgggttggacgcgggcgtcgcatacgcgcgccggcagtgaaccattatttttcgttcgatgatccggagcttggtttcgacctggggacatggaaggggcgctacgaatccggtgatgagtatatcgatctggatgacgacacctatcgaacggtgctgcgtgcaaaaatcggcgccaatagctgggacggcactgtagaaacgctgcccgctgttctggcggccatttacccggaaggcggcatctctatcactttttctgacaacctcgacatgagcatgacgatcactgctcgcggtgcggtaatacctgcaatcactaaagaaattattcggcaaggatacctatcgattaaaccgatggggatcaccgtcaattatgaagttgcggagggataaatggcgaagaatgaatttaaaccgtttgctatcggtgaatatgcaaacgttttgacccaagaagaatatgaagctcttccagctgttggagctgggtatacggcaggtatagcgaaaagcgaacagcttaataaaacatggcgacaagcctcagtaatggcgtctgttttaggtgatttcatcgcagagcaatcaggtgatgatgttctcgatgacggaaaattagatgaattaaaggcctctcttgaaattgctttgtttaattactcttctgaaaaattagatctcaggtatgtaaaaaaatctggtgatactatgcagggtgggctgcacattaacagtgaccttgaggtggatcaagatgcacttattcttggtgaggcaaaggccgggtcattaaattcaatttcagacaccactattgggcgagccctgtatgtgaatggtcaggatttcattatgaaaagaggcctgcaagacccaataaataatgaaaggcaaacgaacggcattcgcttaatgggggctggtgacttatttgttgatttataccagcatgaacgtattggaatgcaccacttctttggtgttcatgtgtccaatggtggcgctgatggctggttcgagtttagaaatgatggctccgcgctggcaaatggtggtttttttgagggcgagcagcgcgtttatagcccaaacaacaagccggatgagttgcatgttgatggggatagttggtggtctcgagattcttcggggaaaatcacgcagggcggaatagtaaaccgttcggcaaactcaaatcccgtatctttcccaatttcattcccaaataaattattaggcatcaagttgacattaagacaagttagcgagactggcggttctactgacaatatcattgcccaaggtgccaataattcagggttctttgtatggatgaacgctaacgaattatcagcttattgggaagcaacagggtattaactgtttcaacaattaaactgagaataaatttatgtcgaataacggtttgccagtcactgacgtggtaggggtttctgttaccctcggtcagcgccgaactgccggcgcatcagcaggtgatgcatacgcccaggcagcccagggcagtgcaatatcagcggcaaattctgcagcgaaagcttcgcaagctgagcaaggagctgttgccgcaacgaatggaattaatgaaaaagcggaacaagttgctattgacgctgatcgcgcggaaaccgcagctgaaaacgcccagaacatcgcagacgccaacacctactacacatcaccaacagaccctgacggcacgattgcgggtattgccggcactcctgacggaaaaatattccgcgtcgcaattaacgacgactcaggtgtaacggtaatttttaaatactataaaaacgccgctggaacggctgaatatatcaatgctgaggctagtgcccgtcttatatatcagatggagcaggcggtaaattacatgaagctgatttcgccacaagggcaatcaaacacccttagtggttatcaggtgatggttactgacttcacagggaaaaacggcctgtttggcgttaatgataatggtgggtttgaggttttaggcattgatggggatttgcaggactatttgactaatttagtttctgcggcgttctccagcaaaatatcaggctatcaagttgttatttttgctcaggatttgaagtcggttatattcgccattgatgatgatggtggactttggcttcctggtcttgatgagcctgtacaagatgctatcggcgcaagcggtccctcatttgtgcgtccatacaatgggtggaatgcgctgtttgcaaacaaggattcacaaataccgctatggagtcgtcaacctgtcatttctgtcacgccagtaactaaaaatggcgtgtcatttgtatatgaggaaaatggcgtactgaaatctggactgatgccaacaaaatggccggcaaatgaggtgtacgggccgccatgtgaattgtcacccatcgcccgtgaagttcatgcatatttggggcgaggtcagtcccttcgtgttggcggtggaaatcggatatcgacgctgaaccctttatttaaagggcgcctattcatgttctctggtgccggccaggacaggggtgcaggagtaccaacggatggcccagtatcagatgaggcgttagctggatttactgatgcccaaccattggcatcacgccagagctgccagacgcctgctctttaccgcattgctaaacgacatattgatcgtggagtagctcctgtcgatatcccgtcaatgtttactcgcatggacgcgcgttctggcactggttacgccggacttaagagagggacgcagccatacatcgatgggcttacgtcttgccaggcctttgcggatcgtgtccgcgcggtcggaaaaatccctgtcatcaaatgcatcggcataacacacggcgaagatgatgcgggaagcggcacagtgacgcaatttggcgattacaaagccatgttggaggaatgggttaatgactcaaatgcggacatgatgcctattaccgggcagacaacgcctattatatgggatgttgatcaaatgggcgggtggattcggacggtgtgggagccaactgggcgaacggtatacggtgatattgtgtcgatcgatcagtgggagtttatgctctctcgttccgacgtgattatgagctgcccgaaattcccgcttaaccgaatgtttccgagtgatttccagcatctgacaaacgtcggctatgctgtgctgggagaatatcaagggcaggctgaggatttcacgatctacgacccggcaggttcccgctggaagcccgttcagcctgagacaattaccaaagttaacgaaaacacgttcgatattggattccattcgccattcggtggcgcgctgcgcttcaacacgtcgatcggtagtgctcctaatagcggaatcgatctgggcttggcatctacaaccgtcacttcagtaacacagactgccgataagacattccgtgtcgttactggtgcggcacctgctgcaaatgactggttccgatttggctttaatgcaaatgaccccagaacgatcaacggcgtcactttcattcatccgctggtaaacatcagcgatgactctcaaatctcaagtgaatacgtatcaggcctgaagctggtaaattggtgcgtaggctctcgaatttttatccccgcataaggattgaacgaaccatgcctggattaccacttaacacaatgaagccatattccggaacgcgtaaagcgattgacctttcaaacgcgtatttagatcctgataaattatttactgctcataaaaatagagtcgttgcggacggcggtacgattttgaatgaggcatcatgcaagaacgaaattgcatttattatcaacctgggactgtgggataatatggcctctgttgcatcgccagaatggggtattaagcaagacggctctggtaatattttgaaaatgtatgggctgggtaacaccccggattatacagcaacgcaatttggaacagcactgcacccagtcacgctggacacaacgcgagaaattccgttagcgattatcaaaatggatggcggaggcagtcagctggtgagcggagcagttgttcttcagggacatgcatcgttgccgtatgccgtttctgttcgtggcatagattacgatattactgataaccaagggatcgcggcgcggtttaatggcccgtcgtggccacacttttactactggtgcataaacaggcaagcgcagaaatttaaatggttctactcatgtgatcaatttaatccaccaactggcgccggcggcgccagcgctagcaaggtatgggacggaaccattggtaggtctgctgcgttggttagccccattgagggcaagttacgggcttacgacagcggggcgttctcatcagagtcgtcaagcctaccaccgccaaatatctcggggataacaggaactatcacgttgggcacgcgctatgctaatgagcaaactatcgctggtgcggcgtatggcgggattggtcgtgtgcgggtgttctcaatctgcaacgacgctgcagcctcacaaatctcagcacgcgcgtagtgtaatatctgccgggagggaacccggcgattcagcaaaactatctttctttatcgatcaggcatctgccattttcgaactgaatctatcttcacaccggttttttcttacgcctatactgtgcgggtatacagtattttgttgtgaggtaaacaccatgggaatgccaaaatttgctagtccggcagcagactacgttgagcgccgcttgagccttgacgagatctgcatttcaaagccgagcgctacttatctgctccgcgccgccggccaggcgatggcggtcggtatccacgctgacgcgttgcttgttgtcgattcgtcggcgacgccggtacacggcagcattatcgtagccgccgaggagggcgtgcacgtgctgcgccgcctgcgcctctatccgtatcgcgctctcgagtttctcgatggttccgggcgggagactgaactcggtaacgaggattcggaagaaggggttcaggttttcggggtggtgatgtactgcgtgaatgatatgcggtcgtgcgagtgggatgatctgccggttatttgatgaccggtcatgttttctggtcttatgatgatttgggagaggtgtgcaggattttgcggtataaaaccgctcgaacttttcccgaatcgaatcgagattattgataactatttgaatgcaaaagacggttaacgaaggtgtttttgatggctttataatccatgcctgagttatctatatgaaaatatttaatttatttgttttcgttcgattaaaggaatcgtattcggtcttttttgtgtgattgatttataagaaaatcccacttaagacgccaataaaattctggtttctctttccagtcgtaacacctcagcccgatctccggctctacacaccacccgcacctatcgctaatttagccgcaccaaaagtcattacgtcatttatggcgctgataagctccgttcattgttcccattatcggtttaacgagagtggcattatgcagaatatcaaggcattaggcgttgtaaaaggaaacctgcgttgaacgatcggctgaatcagttgaagagggcgctacccggctatctcaatgcgtggcgtgagggggccttaccctctgactgggggcaggtggctaatcctgaagtggttgccgccctgttggcggagtgggaggcgctaagcgagttggcgtctcagttcgaaaccgccactgaagccccctccgaaccggccgccttttggcaggcgcgcgccgagctgatggcgcagcgcaatcgtgagcttatggcccaactggcgacgccagtccgtttgcccggcgcacgggtggccttttttggctatgtgaaaacggccgtgatggacgccaggcaggttaaggcggcgattcgcgatgccggttttatcgttgcgggcggcgcccccaacgagaacacagcttaacgcggtttcttctcaaatttctcggcaaaaaagaaccgcagcaatttatgggtccacagcaggatggcgccaaccaccaccagcgagacgacgaaatgcgacagatttttaggcgcggcgtagccgtgggtaaaggagacccccgcgccgctgagcagcagggtggcgatccagaagccgagcagcaggcataaggtacgaaacagtttaaacatggttatcaccaaaaatacggaaagcgccgaccgaacggagaggctcagccggagctttgattaattaaaaccgcttagcgcgaacaggtattgccgcctttactgctattgttattgcagctgctgccgctgtttttgttgccgcctttccccatgccgacgttgccgccgcccttgctgccctccttgaagcagccgccgttgagcgcgcccactgccaggccgccaaggccgcccagagagccggtgatcacgccgttaacgcaatccggcgaggtgtgcttgccgtagaatccctgattggatgacccgcccccgttcttgttgccgccgttgttgttgacgcggccattgctgccgcggttgtcggcaaagttaccggcaccggcgatcaggtgaaagtgtttggcatcgatctcttgcataaaattccctctttatcgattcagttaaattcagtaaagcttgcgcaagccagctgtttttaacagaaaaaatagcgggggtaattaccggttcggataagaacagggggtttattttgcgatattttccagactgatagagcacagaggaatgatatttggggcgtgtggaaccgtagcgctatctgttctcttgggtcggttaatttgttagcatggcgcccctggatgactattggtgcagtacattgaaaattaaagcgttgttatttgttgcgttggccgcgctggccggctgcagccaggagggaacctcgatgaatcagcccgcaaacgagaaaggcggccaaacggaagtgttgctggtcaacagcgcgctggtggactgcgtgggcgtcggcccgatgaagtgcatgcaggtgcgccgctccgcgcagcagccgtgggagttgttctataccggcatcgagggcttcaccttcgaacctggctatcagtatcgattgaaagtgcgcgtcaccccggttgagaacgtaccggccgatgcctcatcgctgcgttacacgctgattgagcagctggaaaagaacaaggcgtaatgattatcaggccgggcgaagtgagcccgtcctgctgttttatagcgtcaaccccatctccgccgcgacctgctccagctggtagcgtgatgtgcgcgtgagtgaaggctccttatcgacatagtagatgtaagcgataacgccaatcgacagcgcccaggcgcggccgcgccgccaggtctcatcgtccactttcaccgcctggcggaaatgttcgcgggcttccgctcccatcaggttccaggcaactatcatatcgaccgcaggatcgccgatggcgataccgccccagtcgatcaccgccgccaactcaccgttgtcgatcagcacattgccgggttgaatgtccgtatgcagccagcatgtgccgctggtgttttcactcacctggctcacgctgtcccatgcttgcagtagggcggcagcgtcgaggtgaggggcgcactgggcaatagattcgcgagtgagggcatctctggcgctgaccgggccgccgcgataagcgctgatcgcgtggcctgcggttgggatggcgtggagtgcgcgcacgaactcacccaattgcgtcgccagcagcgggctgcactcgccgcaggtgggcgtgcggccggtgatccaacggccgatgctccaagcgaaaggatagtggacgttcggcttaccctgggccaagggcgcggaaatcgtcactggcagatgaggtgccagcaacgcggggtagcggttctcgcgcgccagcgcttcggccgccgaggcagtacgcggcagacgaatcaacagctcgtcgcctagccgcagcatcacgttgtcggtaccgccggtggtgacgagttcgatgggcaacgccgcccaggccgggaattgttcggcgagcatgactcggacatgggggagggaaatctcggcctcatcggcatgtattttgggaatggcattcacccggtacggctccttcactggcgcgggggggggcggtcccgactggtctgttcactgcgcttgttttcgcactttcttaagtatatcgagaaaatcaggtatattgtccttcggtttttagctaccaagaaaaaattactatgattatcaaacctaaaattcgtggttttatctgcaccaccgctcacccggcaggctgtgaagccaacgtccgtgagcaaatcgcctacgttaagtcacgcggcgaactgaaaaacgggcctaaaaaggtgctggtcattggtgcatccaccggttacggtctggcctcgcgcatcaatgccgctttcggcagcggtgcggccaccatcggcgtatttttcgagaagcctggcagcgaaggcaaaaccggttccgccggttggtacaactccgccggtttcgacaaggcagctaaagaagaaggcctgtacgcgaaaagcatcaacggcgacgcattctccaacgagtgccgtcagaccgtgatcgatctgatcaaaaaagacctgggtcaggttgacctggtggtttactcgctggcttcgccggtgcgtaagatgccggaaaccggcgaagtggtgcgttccgcactgaagccgatcggcgagccatacaaatccgtcgcgctggacaccaacaaagacgtgctggttgaagccgtggtcgagccggccaatgagcaagaaatcgccgacaccgtgaaggtgatgggcggccaggactggcagctgtggatggacgcgctggacgaagcgggcgtgctggcggataacgcgcagtcggtcgcttactcctacatcggtaccgatctgacctggccaatttactggcacggtacgctgggcaaggcgaaagaagatctggatcgcgcggcgcacgccatcaaccagaagctgcaggccaaaggcggcgcggcttacgttgcggtgctcaagtcggtagtgactcaggcttcctccgccattccggtgatgccgctgtatatctccatcgtgttcaaaatcatgaaggagcagggcattcacgaaggctgcatcgagcagatccagcgtctgttcgccaccaagctgtacagcggtgcggcgccggacaccgacgagaagcaccgtctgcgtctggatgactgggaactgcgcgacgaagtgcaggaaacctgtcgtgaaatctggcagcagttgaacgacaacaacatcaacgaactgaccgattaccagggctacaaggcggaattcctgcgcctgttcggcttcggtctgcagggcgttgactacgacgccgatctgagcggcgaagccaattttgatgtgatcgagctggtctaagcgcgttgagctgtcaaacaaggtcgggttagcccggccttttttattgcctgcgaattatcgggtggctaagcgaaaatgtttatttcgggttaacagaggaaccgggtggttaacattggcagtcggatggtgaaataacggcggttattaaactaaagaaagtcattttttatttacccttgccgccggctgcgggtattttatttcctttaaggagaaaactatgacatggcgttattgtgccacggtatcgttgtttttgttgagcggctgcagcgcgatccagccaacgtcgacgtccccggactggtctcagcctcagccggccacgcgggaacagcggcaacgcatcatggcgggtgagtctgcctcgtcggtattgcatgaaggtaatatcggtattggcggcacgttagatgggtcgaaaatattcgatcgttaaaccgctaaatatattcagccaaattaatgcgcgcattctgccgatattgtcggagggtttacctttcctgcgttattctgccgtggcttgaccattcattgcgttagcagacaattcgttttccttatagggaaccgccggtttatttcggcgtaatcaaaggagttgcccatgacgaagaacatggccgcgatctttctcttgctgttgccgccgctaagccaaagcgccggcgcagcgcgctacgacaggccgtgcgaaggagtgtcgccggtgctgtttcaaaagcgcctgaaagcgctggcgcaggatctgcggcaggaaatgagcgaggaagcgccgccgacagagcgtgatgcggaagagctggcgcggttggcggagtgcgctatcgagcccggcaaagcgcccgtcaccggcgggcagcgcgtctcccgttcagaggaaaagccgacggcatcgccgaacggttgctgagccggcgtgtgcgcagagtcaaagtcaagcgatgtaatgtaaaaggagtcattgatgaaaaggatcgtgttggccggcgtggccctgtgttgttccagcttcgcgcaggcgcgggtggatctggaataccatgcggcggcgccgaaggacagtaaggtcaccgaggagtaccagaaaaagcgcgacgcattgcgccacaaggtgtggaatgtcgataatctgacgctggccaacgagcaggcgattgcacgcgaacaacagcgcgaagccgctgagaccgccgagcggcagcagcggaacctggaacagcagcagaaaaagcagcgctgcctgcacagacactcgaaagatcctcatcccgaggcgaagtgttacatgcacaacttctaacctttaacgtccgggcgctttctgcgcccgacgtcgtttaggccgggcggcaatgctctttcagcatggcgatcgcgtccggtttcagctgatacagatagaccggccggccggtggcgccgtacagaatacgggtgccgaggatgccgctttccgccagatagatgaggtacttgcggcaggacacccgcgaaatgccaatggcgttggccagattgtcggtagagaattcgctgtcgtgctgctgttcgatccactcgcacaccgtgctcagggtgatgctggtcaggcccttcggcagctttttgctctcctggccgccgggctggcggcgcaacaggctgtcgacgtcggcctgcgaaaactcgcgttgcgccaagagctgtgactgttgccggtagtggctcagcgcctccttgaagcggctgaactggaacggcttgatcagataatccaccacgccgtagtgcagcgctttttgcaccgtgttcacgtcgctggcggaggagatgatgatcacatcggtcttttcgccgagttcgcgcaggccgggcagcagatccagcccgttctcctgctgcatgtaaatatccagcaacaccagatcgatgctgacgctggcgtcggccagcagggcacgcgcctggctcagggtcgcgaccgtcgcctggcagtgaaaaccgccgacctggctcaggtagtatttattcagctccgccaccatcgggtcgtcgtcgacaatcagtacgttaatcatgggctctgctcttggcctgatagggaaggtgcacgaaaaattgggtcagctcgcccggttcggattcgaaatcgatgctgccgcccagtttctccagatggctgcggatcagcgccaggccgatgccgcgtcccgttcccttggtggaaaatccgtgttcgaagatgcgcgcgccgatcgccggatcgatgccggggccgtcgtcgctgacgatacagtgtaattgatcgtcgtgatgatggaagctcaggccgatctcgtggccctcaacgccgtcgatggcgtcgatggcgttttcgatcaggttgccgagcacgctgatcagcacgtgggtggtttccgcatcgtcggtttccggcagcaggctgttttcctcgatggtcagttcgatgccggcctcgtgggcgcggctgatcttgccgatgaagaagcccgccacctccggcgaatggatcttgcgcagcagcgcgccgatctcttcctggtagttgctggcggtgttgatgatgtagttttccaactgctgataggccttcatatgcagcatgccgagtatcacatgcagcttgttcataaattcgtgcgactgcacccgcagggcgtcggcgtagtgcgccatgccgctcagccgctgcagcaggcggctgatctcggtcttgtcgcggaaggtggcgatggcgccggtcacttggccgttgacgatcaccggcacggtattggtcagcagttcgctgccgttgaagctgatctgccgatcgcgcagcggttcgccgctggccagcacctccgccagatgcagctgcgccggccaatgtttgctggcggcttccagcagcaggttttccaccggcccgctctggcgcagcaggcgcttggcttcgtcattgacgatggtgatgcgggattcattatcgaccgcgatcacgccttctttaatcgattgcagcatggcgttgcgctgttcgaacaggttggagatttcgtaaggctcgaaacccagcatgatgcgtttgagcgcagagaccaggaaaaaggtgcccaggctgccgaccagggcggcgaaggcgatggtccaatagatgatccatcggctttccgccaccacccgctgcacggtgtccagcgcgatgccgagcgccaccacgccgatttgttttttctgatcgtcatacaccggcacgaacacccgcagcgccggagccagcgtgccgcggttgatggcgctgttgacgttgccttgcagcgcgggcgccaaatcgtcgccgataaaatgcttgccgatcagccagggtttagggtgcgaatagcggatgccctgcatatccaccaccaccacgaacagcagctcgttttgatggcgcacctgctcggcgaagcgctgaatggcgccgctgtgatcgcgccgctgcaggccgtcgatcacggtgttggagagcgccagcgtgttggcgacggcgatggctttttgctgcagctgatcttgcccctcgcggctcatctgcacgaaaaacagcgcgaacaccaccagcagcaccgaagcgatgatggcggacaccatcagcgtgatggaggtgctcagcttgagcggcacccgttgttttggcatggcggttctccgaatggcgatatcacggcgtattctagcgaggaatgcggcaagctgcagttaccggcagcaggttatagcacgctgccggggtgcggaggggttattttagttacaaaagcgggttactgctggtggtagatctccagcgcctgttggccgctggcgccctgatggatgatcgccatcagggcgcgcaccacctgcgacgggttgctgtgttgatagacgttgcggccatagaccatgccggaggcgccctgggccatcagcgcggcggatttctccagcaccgggcccagctctcccttgccgccgccgcgcaccagcgtcgggcagcgcgccgcttccaccacgcggtgaaaatcttccacccgatcggtcggatcggccttgatgatgtcggcgcccagctcgcgcgccagccgcaccagcggcacgattttctccacgtcacccagcgatccgtaggcggcgccctggccggccggggccatcaccagcggttcgatcatcagcggcatggcgtagcgatcgcaggcgtggcgcaggcggccgatgttttctacgcactggcggaaaatgccgggttcatccgggatcatatagaggttgaccaccaccgcggcggcgtccatttgcagcgcggccaggatcggcgcttccgggttgtgcagcaccgcccacatttcgcggtggcgtgcggcgttataggcgttgccgacgtcggtgcgcatcaccagcgccggtttttcgcgctgcggcgctcgctgcagcagatccgcctgcccgtagttgacctgaatcgcgtcggggcgcgcggcgatcaggttgcccatcacccgttcgatatcttccagcccgattaaaaaatccggttcgttggcgatgccgtgatcgatcgccacatccaggcacttgccgttgttgaacaggcggttcatccgcaccttactgctgagctgcatgtcaggtcctcctgagatagggatatgtccattattgccgagtaaggatggtcgggaaacgcagaaaccgcaaactgcgcgcccgctcgcagtttttgccggcgcacgaaaggggaacgctcgcgggcggctttcatttcatttgttagatccgtgtcatgtttttgttaataagccattccaaaacgcatgtttcgcttgtttgggttaaaaagtttcaatagtctaaattatgaaataaacatttaaaaaagcggcgaagacgcggcttgctccaccaggagtttatttcaattgattgtttttaatctattttgagatatcgatcaccattttgttcacggccttaatacggcgataacgcggtaatttcgccgtatcaaagggataacaccgaccgtattgttgtttgaatgtaaaaaatatttttcattagctgtcaaccaacagacctcttcattctaacgattaaagggtaacgaacatgaagctgaagaaattgatcgccgcctcggtactgatgtgcatgctgccggccagcgtgttggcgaaagacatcaagatcggcgtttccatggcttacttcgatgacaacttcctcaccattctgcgccagtcgatgcaaagcaaaatgaaggccgacggcaacgtcagcggccagttcgaagacgccaagggcgacatcgcgcagcaaattcaacaaatcgaaaacttcgtcagccagggcgtcgacgccatcatcctcaacccggtggatacccagggcgtcaagccgatgatcaaactggccgagaacgccaagatcccgctggtgttcgtcaaccgcaagccggaagtgacgctcccggccggcatggcctacgtcggctccgattccaagctggccggcaaactgcagatggaagcgttggccaagctgatgaacggcaagggcaacgtgatgatcctgatgggggaactgtcgaatgaatcgacccgcgaccgcacccgcggcgtggaagaggtggcggccaactatcccggcatcaagattgtcgataagcaaaccgccaagtggacgcgtaaagatgcggtggatatcaccactgactgggtgctgaccggccagcagatcgacgccatcgcctccaacaatgacgaaatggccatcggcgccatcctggcgctcaagcaggctaaaaagtccggcgtgcgggtggccggcgtggatggcacgcccgatgcgctggaattcatcagaaaaggcgatctggcgctgagcgtgttccaggacgccaaaggccagggcgagggtgcggtgcagaccgccgttcaactggtgaaaggcgagaaagtggagagcaacgtgctgatcccttaccagctgatcacccaggccaattaccagcaattcgccgataaaaacaagaaataagccttgaagcccgccgcgggcgccggtgtggggcgagcgcggcggaaaacgtgggtcagtgcggaggtaagcggtatgtacccttatgttcttgaggccgaaggcatcagcaagcagttccccggcgtcaaagcgctggataaggtctcgattaaaatcaaacccggcagcgtgcacgcgctgatgggggaaaacggcgcaggcaaatcgacgctgatgaaatgcctgatcggcatctaccacccggatgaaggctcgataaaaatcaaaggccggccggtcaccttcagcgacacgctgcaggcgctgcattcgggcatttccatgatccaccaggagctgaacctggtgccttatatgacggtagcggaaaacatctggctggggcgcgagccggcgcggttggggttcgtcaaccacgagcagctgaacgagaacacccgcgagctgctggcgcggctgaacatcaaactgcagccggacacgctggtgggcgaactgagcatcgccaaccagcagatggtggagatcgccaaggcggtgtcctacaacgccgacgtattgatcatggacgaaccgacctcggcgctgaccgaaggtgaagtggtgcacctgttcgccatcatccgcgagctgcgcgagcagggcaaaggcatcatctatatcagccacaagatggacgagatcttcgccatcaccgacgaagtgagcattttccgcgacggcactttcatcgcctgcgacaagaccgaaaatctgaccaaacagtcgctgatcaccatgatggtggggcgtgaactgacgcagatgttccccaaattcaacaacaatatcggcgaggaagtgctgcgggtggcggggctgcgccgcagcggctggttccacgacgtgtcgttcagcgtcaaacgcggcgagatcctcggcgtcgccgggctggtgggcgccgggcgcagcgaagtgatggaaagcctgttcggcatgcacccggcggaaggcggcgagatctttatcgagggccaggcggtgaaggtcgattccccggcgaaggcgatcgagagcgggttggcgttcctcaccgaagaccgcaaaaaatccggcctgtttttggtgctgtcggtggtcgagaacatgagcatcgtcaacctgtcggaatacatcggcaagaacggtttcgtcagccacgtgcagatggccaaagactgcatggatcagatcaaaaagctcaacatcaaaacgccgaccatggatcagatcatcaataacctcagcggcggcaaccaacagaaggtgctgattgcgcgctggctgctggcgcagccgaaaatcctgatcctcgacgaaccgacgcgcggcatcgacgtgggagccaaagcggaaatctaccgcctgatcagcgagctggccaaccgcggcgtcgccatcattctggtctcctccgagctgccggagatcctcggcatgagcgaccgggtgatggtgatgcacggcggccgcatcaccggcattttggacaaagacgacgcggaccaggaaaagatcctggcgctggcctcagaataacgaagggtgaacatcatgagtaacgtaaagattgagaagccgctctccgccgattcaacgagcaagggaacgctgttctccgggctgagcggcaaaatgccgaaggataccggcatcttcatcgtgatgctcggcatcgcgctggtcttcgaaatcctcggctggtacatgcgcgatcagtcgttcctgcttaacccgaaccgcctgctgctgatcgtgctgcaggtggcgatcatcggcatcatcgcggtgggcgtcacccaggtgatcatcaccaccggcatcgatctctcctccggttcgctgattgcgctgactgcggtggtggcggccagcctggcgcagacctcggacagcatttcgccgatgtacccggggctgctcgatctgccggcggcgatcccgatcggcgcggggattggggtgggcattgtctgcggctttatcaacggcttcctgatcacccgcaccggcattccgccgttcatcgccacgctggggatgatggtatcggcgcgcggtctggcgcagtactacaccaagggtaacccggtcagcttcctgtcggacggcttcacgtcaatcggccagggcgcgatgccggtgatcatcttcctggtgattgcggtgatcttccatatcgcgctcaaacacacccgctacggcaaatacatctacgccatcggcggcaacatgacctcggcgcgggtgtccggcatcaacgtcaacaaatatctggtgacggtttacaccatcgccggcgggttggcgggactggcgggcgtggtgctggcggcgcgcgtcagcagcggccagtcgagcatggggatgtcgtacgagctggacgccatcgccgcggcggtgatcggcggcagcagcctgatgggcggcgtcgggcgcatcaccggcacgctgatcggcgcggtgatcctcggccttatcaaaagcggcttcacctttatcggcgtcgattcttacattcaggacatcatcaaaggcgtgattatcgtcgccgccgtgtcgatcgacatgcgtcgcaaccgcaagaaacactgattgccgtgaattgccgccggcgccagggttggccggcggtgtttttttaccggggggcacatcatgaattacctgaaagggctgtggctggcggtggcgctgtgtgcgtccaccccggcatgggcgcaaaccatcggcgtatcgatggcctatttcgaccagaacttcctcaccattatccgccaggcgatcgacaaggaggccaaggcgcgcggtattaccgtgcagttcgaggacgcgcgcggcgacgtcggccgccagaccgaccaggtgcaaagctttatcagcgccggggtggacgcgattatcgtcgatccggtcaactcggccagcacgccggtaatgaccaaaatggtgcaggccgccggcgtgccgctggtgtacgtgaaccgcacgccgggcgacgccaaactgcctcagggcgtggtgttcgtcggctccgacgagcgggagtccggcacgttgcaaatggaagagttggcgcggctggccaactatcagggcaacgtggcggtgatgatcggcaacctgaccgacgccggcgcgctgcagcgcaccaaagacgtggagcaggtggtggccaaatacccgaacatgaaggtggtgcagaagcagagcgccaactattcacgcagtgaaggcatggatctgatgatgaactggctgaccaacggcgaagcgatcgacatcgtcgccgccaacaacgacgagatggcgatcggcgcgatcatggcgctgcagcaggcgggcaaggcggacaagaaagtgctgatcggcggcattgacgccacgccggacggcctcaaggcgctggcctccggcaagatgcaggtcacggtgttccaggacgcgatcggccagggcaaggcgtcggtcgaggtggcgcagcgcatgatcaacggcgaaaagcttgagccgtattactggatcccgttcgagctggtgacgccggccaatcaggagaaatacgcggccaaaccgtgagttcgccgtcggatccgcgttgccggggcgctgcttgcagcgccttttttattgcgccaattgcatgtccgcttgcggccagcgcggcgtcgaaccttgcctcacactgaggatctttaaacagcgtgaggatgagcgatgaacgcattaaacggcaaggtggcggtgatcggcggcgccagttcagggatcggcaaagcggcggcgctgctgttcgcccggcagggggcggcgctggtgttgggcgcccggcgcgcgccgctgttggccgagctggtggaggacattcggcgcgagggcggccgggcattggcggtggcgggtgacgtgcgcgatgaagccttcgccgaacggctgacggcgacggcggtcgacgaattcggcggcctggatatcgccttcaacaacgccggcacgttggggccgctggggccgtcgctggcgctcagcgcgtcagaatggcgcgaggtgctggaaactaacctgtccagcgcctattacggcgccaggcatcaaattcccgccatgctggcgcgcggcgcgggctcggtgatcttcacctccacgttcgtcggccacaccgcggcgtttcccggcacggcggcctatgcggccggcaaatcggggctgatcggcctgacgcaggcgctggcggtggagtttggcgggcgcggcattcgggtgaacgcgctgctgccgggaggcaccgatacggcgatggggcggcagatgagcaataccccggaagccttggcgcaggtggccgacctgcacgcgctgaagcggctggcgatgccggaggagatcgcgcaggcggcgctgtatttggcgtctgacgcttcctcatttgtcaccggcaccgcgatgctggtggacggcggcgtgtccattcagcgcggctgaggttggcatggcccgtggcctggcgccacgggcatacgggagagcgttaccagcctttgacggcgtcgcctttgtaaatttcggcggcgctggccgccacttcgtcggtctgataggccttgaccagatccttcactttctcgctgtctttgttgtcgatgcggctggcgaaaatgttgacgtaaggcgagtttttgtcttcgacaaacagcccgtccttggccggcgacaggccaatctggctggaatagttggtgttgatgatcgccagcgtcacctgttggtcgtccagcgcgcgcggcagctgcggcgcttcaatctcgacgatcttcagctttttcgggttgctgacgatgtccagcgcggtcggcagcaggccgacgccgtctttcagggtaatcagcccctgtttttgcaacagcaacagcgagcggcccaggttggtgggatcgttcggcaccgccacctgcgcgccgtccggcagctggctgagtgcggttatcttcttcgaatagccggcgattgggtagacgaaggtgttgcccaccgccgccagcttgtagccgcgctcctgcatctgcttgtccagatacggtttgtgctggaaggcgttaacgtccagatcgccgttgttcagcgcttcgttcggcagcacgtagtcgttgaaggtcaccacctccacgtccagatcgtatttctgcttggcgaccttttgcaccaccgcccacagcgactgatcgataccggcgctgatgccgaccttgatgtggtgatcgtcctgtgcggttgggccgcaggcggtcagcagcagcgtgccggcggcggccagcgccagggtgaggtttttcagcgtaaatgtcattttcccagggtccttttcaacattgcctgctaattttggctggcagaatagtggcagtgactgtaggtaatcgctgggctaaaacaaaatactgattcactatgactcatagcgattagctatgagcggccgcggcccggtgcggagcggattgttttgacggcgaatcggcgggcttattatgatagccgttggcccgcgagggcagactgggtactgaaacgaaggaaaagacaatgcgattgaacacttggagcaaggcgctgctgccgctggtggtgttggcctgcgtctcggcgactcaggttcgggcggcggaaagcgataccgggccgatccccaaacagctgctgggcaactggcgcgtcagcaagatcgtgccgacccagaccaccggctgctgggatcaacagcaggcgcagagcctgatcggcggcaaaatcagctacaaagcggatgcgttcagctggaacggcacggcgctgaaaagcgaaggggccaccgtcagcaccgtagaagcgcaggagtttgtcgaggacaatgccggcagcagctcctacatcgatttcccgatgctgggcatcagcacgccgtcggtcgagcgcgtggccattcagcacgcggataccgccatcaaaggcatcaccgatcagggcaccgatggggtgcccggcgataacgtgctggtgaaagacgccaacacgctgatcctgtcgctgtgcaacgtctggtttgaggcgcagcgcgagaaataattttttgccttcagccccgggcgacggggctttcccactgcatcacctcccgccacgagcgccatttctgaactaaaattaatcataacgatatgaccccagcgtgatatcggagcctcggctcaaccgagtccatgacaggaggcgctatgtgttaccaccatattgtcatcgccaccgatctgagcgatgacggcaaacggctggtcgaaaaaggggcgttgctggcggaggcgctgcaggccaaactctcgctgatctatgtggacgtccactacgacacctaccacgcggcgatcggcttttcggagcgcagttatgacggcgtgccgttcgaagagaagatccgcaaagagctggaacccaccacgcaaaacgtcaattatccgatcgcggaagtgattatcgggcgcggtggcttcgttgacgaactgcgcacggcggtcgtggacaagaacatcgatcttctggtgttcggccatcaccacgatctgtggagcaacctgttttcttctacccgcaacgccatcaaccagctgaatatcgacgtgctggtgatcccgatccgatcataaacgcgggccaccgccgggcaacgatggcggtggccgccgcggcttattgcgtgaagaagtcgttatacaacatgtacagatgcgccgcgctccaggagaagttcggcgcgccttgctgtttgccggtgagcgggttgtagttctcgcggatcggcccgtcggcgaccaggccgtcggcgtggcggaagaaggcctgcgccatcgctaccgcgtcgtcgcgatagccgtagcgttccatgcccttgaggccgaaatacaactgatcgacccacacgcggccgcgccagtagatgtccgcgccgaacgccgggttggtcagcgccgcggtgccgagcggcacgtaggtattgaactcgcgcggatccttcatcaccctgaccaccgcatcggcgtgcggctggctggcggcgccgttgaacagcggcgaccagccttccggccctttgccgcgttcgacgatcggtttgccggcgcagccgttggccaacggccggctttcgatgcggatgtcatagaagaaaccgctctgtttatcgaacatgcaggtgttgatataggccgccagcttatcggctttggcgcggaaggactcggcctcggcgccatggcccagaatatcggccatctccgccaggtagcggttgtcgctgtacatatagctggcctgatccaccgactcctgcagcagcgagtagccgagcagcgtgccgtccggcgcgcggttttcggcgaatttcacctgccagtcttcgcgtttgccgccctgcgccacgtagcgcgccaattgatccggatcgataaagccgaataccgccgcatcgtcacggcccgactcccaggaggcggcggtctgcgccgggatcgcgatgctgtcgtaatgcccctcgcgcacgatgcgatcgtagttgtcgaggccggccagcgtttgctcgcgttgcccgcgtttgacggtaaacagcatgcgcccgtcgggagtattgtgcgctttgtcacgggtggcgccgtactccggcacgccgttgccgttgtgatcgcggttgcgcagccaccagtcatggtaagccaccagcttcgggtacatctccgccagccagcccttatcgccggtgacgcgatagacctccatcaccgcccaggccgccaggctcggcttggtgttgcgttcgttccagttgccgccgtcgccgccgcgctccgggctggggttgtaggcgataaggtcgggcaggaaaccggcgtcccacggccgcaaagcgtcgcccggccggatctggtaggcgaacaccgcgcgaatgttgtccttggccacgtccgggttgaagtgcgccatggcgtaggcctgtttccaggtgtcccacggccaggtctggttgccggagaaccagcgcccggtgaccgacggggtgaccgagtcgaacttcatcgccccggcggcgccgcgccagttgccgttcagcgtttctatcgctttgaccgccacacgcgtttgttccgccgtggcgtgcgggttgcggagcccggcggcgagatagcgttcccaacgctgggccgatgcggccatatagcgctgcgggtgagcgaggatgtcggcgatagcgcgctgttcgcgctgcgcctcgtcggcggtgagcaggtgcgaataggtggtgtacagcgtggtggtgccggcgatgcgcgccgtggcgcggaagcggtggccgtcgaccgtggtgcgctgcggcagcgatttatggatctgatactcggactggccggaggtcatcagctgcgacggcgcacgcaccttgccgaaggtgacgcgcaggccgtccgccgtcggcacaatgcggcgcgtgtagtccggaaacgcctgttcgagggtcgccggcggctgcggtttttgctctttggccgcgtagcgctccagcaattcgccatcccacaccagctccagcggcgcatcggtgataatttgcgtctccagcagcgaggtgcgcgcactggcgaagcgcagcgtcaggttgacggtaactcccggcgcgctgagccgctgcaccagggcgccgggcaggctgtaggccgtcatggtgaaagacaccggcttgccgttgcgatatacgctgagccgatcgaaattgttggccataaagttgatgtattcttcggtcagcagcgccgggccggggaaaccgcccatgccttccgggccgctcggcaacaggtggccatgccaggcgccgagatcgaagaacgggttgaagcgttgatgatcgtcgaagtcataatcgagcataaaatgcggcgcgccgtggcgatcgataacgtttgggtagcgttcggccagtggggcagtgggcgttttcggcgcgcagcccgccagcgtcagcgcgagggtgagggcggtggccagcggcgtcaggggagtcatgttcatcgtaggggcctcaacggttaccaatagaaatattgcatcagaaacaccgagttgctggcgccggtgctgtcgttgcgcataaagaatttgctgtccagcgcggtggccagcttaccgccggcatattcgtaccagatgccgaactgggcgtaggaggtggcggtatccgccgcgttatcaaaccggtggcgggcgtagctgtaggcggtggagaggtacagccctttggcggtttccgtcatcgcactgagcatcaggcccgattcgctgccgggatggccgccgctgtcgcctttgccggtgtggtgccagacgcggccggccaggtgtttgccgcgcagccccagcagaaacagctgccccaggccgtcggtcacctccaggccgttcagcagcgtcagaccgtcttgcagatcgtactgggtgtagccgttgatcatcgcccggtaggtgtatttgtcggagtagcggtcgtatttgccgaagtgcagcagcgccttgctctcgtcgatgcggctttccggcgccgccgtcacgctgtagcgaaagcgcccggtcaggttttgcagcttggcggcgtagctgagatcgcgggtgttggggatcacgtagccgtactccggcgtgaagtcgccccaccattgcagatcgtcgagcgacgagtcgttgcgtacgctgagcatcatctcggtgccgtcatcggtacggtaaccgccgtagaaacggttcaggcccccctcgaagccgccccagccgtgtccgggcgtccaggcgtggccctggctgtcggcctgcacggtccagccctcgccgtaaatcaggccgaaccagtgaccctgtttgatctcgaggccgccttcgatgtaggtgccgtcgctgtatttatgttgatgttcgccgttcaaatagacgctgccgccgatgccgagctcgccgtaaaagcgcagggcggtcgcggcggtttcgggcaacggcggcggcggcagctggttgcgctccgccggggtaacgggttcctgcgccgcccagaccggcgcgctgagtatcagtaacaagggcaacagggcgtgatgatttattgatgtcatggggcatgtgcctggtgttggatggatcggcgcgtcagtcgaacggcggctcacgcaaggtcgctcccggctccttgggagaagagataaagtccgcccggtcgcgggcggtaaacggcaggtatattagtaaaatatttagtaaaaaatacgctttaatcagtaaatcgttaacttgatcacaacgggtgaaatgggtatctttcgctgcaggcgcccggcagcggtttgtatgagcgagcgccggcccggtctgggaagagaggggcgggcggcactgtacgttgcgccgctatccgattaagctaccgtttttcgtctgtgcattgggactctatggccacactgaaggaaattgctgaagccgctaatgtgtccgtcgccaccgtttcgcgcgtgttgaatgacgaccccaccctgagcgtgaaggcgcaaacccgccagaagatcctggaagcggcggagcgcctcgaatacaagattgcgccttccaaacgacaaagtgggcaacgcctgcaattcgccgcgctgttcacctatacgcagggtgtggagatcaacgatccctattacctggcgatgcgctacggcatcgaaacgcagtgcgaaaaactgggcgtgatgctgagcgccggttacgactttaccggcgacaaggcgctgccggcggccgacggcctgctggtgatcggccggccacagcctgcgctgtatgagcagctcaggcagcaggaaacgccggtggtgtttatcgacggcgtggtggacgatgagcgtttcgactgcgtcaatgtcgacctgtacaagatcagccgcaaggtgatcgattacttcatcggccgcggctatcagcgcatcggctttatcggcgggcgcgaccatccggccggcatcgaccagcgcgagcaggcgttcgtcgagtatggccggcagcaaaacgtggtgcggccgcaggatatttaccacggcgatttcagcagccagtcgggctaccagtgcgccaaagcgatgttgcagagcaagaatggctatccgccggcgctgctggtggcgaccgattcgatcgccatcggcgtgctgcgcgcgctgcatgaacacggcattcaggtgccggggcagatcgcgttaatcagcgtcaacgacattcccaccgcccgctttattttccccgccttgtccacggtgcgcatcccttcggaaaccatgggcgcacaggccgtcaacctgctggcggagcggctgcgcgatgagcgcgccgtcccgctgtcgatcttcgttcccagctcgctgcagctgcgtgacaccaccgtcgcctgaccgccccccgcctcggcggggggcgttggcgctcaaaattaacgtcatgataaaaaaaggcatttgagatttattgtgatcctgtcgtcatttggtaaatatcggctgtagtttttactaaatatttactatcgtttccgcattgcacaggtgtcgggagacgtgacgtgaataattgggaaaacattgaaaaacagtcggagcaccggttggcgccgcgcgcgagcttcttcagctacgcggactccgagcaggcgctgagcttcgatcgcaacgccagccggcgtttccagctgctgagcggccgctggcgctttcggttcttcgagcacccggcgcaggtgccggcggcgttttaccgtgagccgatgagcgactggggcgatatggcggtgccgggcatgtggcagctggaagggcacggccacctgcagtataccgatgagggcttcccgtttccgatcgacgtgccttacgtgccgaccaacaaccccaccggcgcctatcagcgccactttacgctcgacgccggctggcgggaccagcaagtgctgatcaaattcgacggcgtggaaacctacttcgaggtgtacgtcaacggcggctatgtcggcttcagcaagggcagccgactgtgcgccgaattcgacatcagcccctatgtgcggcagggcgagaacctgctgtcggtgcgggtgatgcagtgggccgattccacctacatcgaagatcaggacatgtggtggatggccggcatctttcgcgacgtttatctgatcggccagagcgccactcaccttcacgacctgacgctggtcaccaccttcgatgagcgctattgcgacgcgcagttggcgatcgacgccgagctgcgccatctcggatcgccggccgccgagggctgccgcctgcaggcgcagctgttcgacggcgatcgctgcgtggcggagcagtggcgcgacgatctgcgcatcgagcgggcgctgatctgccgtttcgagctgccggtcagccgcccgcagcagtggaatgcggaaaatccctatctgtatcagctgttgctcagcctgtatgacagcgccggcaacctgctgggcgtggtgccgcagcgggtgggcttccgcgagatcgcggtgcgcgacgggctgatgtacgtcaacgggcgttacctcaaactgcacggcgtcaaccgccacgatcacgatcaccgaaaagggcgcgccgtcgatatggcgcggatggagcgcgacatcgtgctgatgaaacagcacaacatcaactcggtgcgcaccgcccattatcccaacgatccgcgtttttacgagctgtgcgatctctatggcctgtttgtgatggcggagaccgatctggagagccacggctttgccaacgttggcgatctgagccgcattaccgacgatccgcgctgggagcaggcttacgtcgagcgcatcgagcgccacgtggcggcgcagaaaaaccacccgtcgatcatcatctggtcgctcggcaacgagtccggctacgggtgcaacattcgcgccatggcccggcgctgcaaggcgctcgatccgacccgcctcatccactacgaagaagaccgcgacgccgaagtgaccgacgtgatcagcaccatgtattcccgcgtggcgatgatgaacgccttcggtgaatacccgcaccccaaaccgcgcattctgtgtgaatacgcccacgccatgggcaacggccccggcgggctgttcgaataccagtcggtgttcaaccgtcacgccagtttgcaggggcactatatctgggaatggtgcgatcacggtctgctgagccacgacgagcaggggcgcgagcgctaccagtacggcggcgattacggcgacttcccgaacaactacaacttctgcatggacggcctgatctacccggaccagcgccccggccccggcctgcgtgaatatcagcaggtgctgtgcccggtggaagtgacggcggaagaaggcgcaggcgacgtgctgcgggtgaaaaaccgctactggttcagctcgctggcggacatcacgctgaaggtcagcgtcaagaccgacggccgcaaggtggcgagttacgaattcaagctgccgcatctgcagccgggcgagagtgaagacatgcacctgccggtgctggcgctggggcagggggaaacgctgatcgacgtggcggtgcataaagacagcgccacccgctacagcgagagcggccagcggctggggcattaccagcatctgcgccaggcgacgacgcggctaccgactccaccggtggtcgatgcgccggcgctgcaatgccgcgaggaaaatcatcagctgctcgtcagcggcggccggttccagctggtgttctcgctgctgagcggcgaactgctgtcgtggcgggtagacgatgaagaaatagtgggacgcgcgccgcgcatcaccttcttcaaaccggtgatcgataaccataaacaggaatatgaggggatttggctgccgtatcacttccccatcatgcaacagcatttccgccgccttagccggcaatggcagggggacgatctgctgatcgaggtgcgcagcctgatcgcgccgccggtgttcgacttcggcatgcgctgcacctatcgctggcgcatctctccgcagggctgtgtcagcctggatctggccggggagccttacggcgatttccggcaggtgatcccgaaaatcggtctcgatttcggcatcagccgccgcttcgagcaggtggaatactacggccgcgggccgggtgagaactaccgcgacagctgccgggccaaccttatcggccgctaccggcagcgcgccgatgcgctgttcgaacactatccgttcccgcaggacaacggcaatcggcaggacgtgcgctggctgagcctgcaggacgcggcgggcaaggggatcttcatccaaccgcggcggccgatcaacttcagcctgtggccgtacagcgccgagatgctgcatcaggcccagcacatcaacgagctggagcctgacgattgcctgacgctgaacctggacgatcaggtgcttggcctcggctccaactcctggggttccgaggtgctggacacccaccgggtctatctggcgccgttcagctacggcttcacgctggtgccgttcgacggccggcaaacggacggcgccgcgctcgccggttatgacttcgcgccggcccctcatcacccgcagtctgcggaggaaaacgcatgatcattctcgaatccctgacggagtttcagcgcatttatcacagcggcaagaaatggctgcgctgcatggaggcgatcgccaatgtcgatcgcatcagcccgaacgtgtgccattcgatcggcgactcgctgacctatcggctgagcgtcggcgccggccggcagcacggctggctggaaggcaaccgccgctacttcgacgtgcactactacctcgagggagaagagatcgtcgaagtcgccgacaaacgggcgctgacgacggtggcgccctatcaggacgaaaccgaccgcgagtttttcagcggcgaaggcgagaggcgccgggttggcaaaggcaacgtggtgatcttcgaaaaccaccaggctcaccgcttcaaagaaagcggcaaggtaaaaaaagtcattttaaaagtgacggtggaagacagctatttcatcaacaaatagcgcgaccgccgatcgataacaacaaaccgaagtcccctacaccattcggagaatctctatggctgcgtcgaacagaaacaccatcggcaagtttggcctgctgtcgatgacgtttgcggcagtgttcagtttcaacaacgtgatcaacaacaatattcagctcggcatcgcctcgtcgccggtattcctggtggcgacgatcatttacttcattcccttttgcctgatcatcgccgagttcgtctcgctcaaccgcaactccgaggccggcgtctatgcctgggtcaaaagtgcgctcggcgggcgctgggcgtttatcaccgcctacacctactggttcgtgaatctgtttttcttcaccgcgctgctgccgcgcgtcatcgcctacgcttcttacgcgtttttaggttacgactacgtgtttacgccgctgaccacggcgatcatcagcatcttcctgttcgccttctcgacctacatctccaacagcggcgcaaaactgctggggccgatgacctccgtcacctcgtcgctgatgctgctgctgacgttttcctacatcatcctggcgggcgcggcggtgctgggcggcatcgagccggccgatccgatcaacgtgcaggcgatgacgccgaacttcaactgggcgttcctcggcattaccgcctggatcttccaggcggcgggcggggcggaatccgtggcggtgtacgtgaatgatgtgaaaggcggcagccgcgccttcgtgaaggtgatcatcgtttccgggctgttcatcggcgtgctgtattcggtgtcatcgctgctgattaacgtattcgtgcaccgcaccgacctgcattttaccggcggtacggtacaggtgttcgaaggcttgtcggcgcactttggcctgccgacggtgctgatgaaccgctttgtcggcatcgtttccttcaccgccatgttcggttcgctgctgatgtggacggcggcgccggtgaaaattttcttcaccgagatcccgaagggcattttcggcgagaaaaccatccgcctgaaccggcacggcgtgccgacgcgcgccgcctggatccagttcttcatcgttatcccgctgatgctgatcccgacgctgggctccagcagcgtgcaggatttgatgaacacgctgatcaacatgaccgccgccgcctcgatgctgccgccgctgttcatcatgctggcctacctgaatctgcgtctgaagtacgatcgggtggcgcgcgatttcaaaatgggctcgcgcctgcagggcatcgccatcgtcagcgtgctgatcgccatcttcaccgtcggcttcttcgcctcgacgttcccgaccggcgccagcatcatgaccatcgtgttctataacgtcggcgggctggtggtgttcctcggctacgcctggtggaagtacaaccgctactcaaagactctgaatgccgaggcgcgctaccacgaagacatgccgctggcgcgtctcgcgctggaagcgcaggagggggcgcctgccggtcaaccggcgctgaccacgcccgcatgcaataaaccgctgtaattgctcacctctcgactccgcgccccggcgcggagtctcgccttgcgaaaaaaatctgcctctgcgtttgcataatacataagtgaatactaatgtgtttgtatgaacgaaaatgacatcttcaaggcgttggccgatccgacccgccgcagcatcttcgacaaactcgctgtcgccagcatgaacgccagtgcgttgcgcgaagggctgcccatcagccagtcggcgatgtcgcaacacctggcggtgctgcgtaacgccggactggtacgcgagacgaggcaggggcgctgcgtcaattaccaggtcgacccggaagggctggcgcagatcgcccagtggctggcgaagtaccgcgcctactggccggcgcgcatcgacgcgctgcaaactttgctgaaggacatggatcaatgaacaaacaggctgagcggccgccgcgcgaccggctggtgttggaatattcgctcgaggcgccgccggaaaaagtgtggcgggcgctcagcgttcccgaattgcgtgagcagtggctgccgacgggggatctggcgcaggccgagccgctggccgccacgccgggcgaggcggtgagctatcgcttgcgcgacgaccaaccgccgtttctcgaaagcgtcgtcaccctgcagatcgtgccggacgccggcggcggcagcctgctgcggattatccaccagctcgatgccgccaacgatggcccgccgacggtgatgcgcgccgcctgacgcgttaaacacatttccctttgttgccaacccaggagttcaccgatgcgtgagaagatgatgctcgtcccgatggtggtggaacagaccagccggggagaacgttcctttgatatttattcgcgtctgctgcgcgatcggatcgtgttccttaacggcgaagtcaacgacgacgtggccgaaatgctgtgcgcccagctgctgtttctggaggcggaaaacccggaaaaacccatccatctttatatcaactcgccgggcggagtgatcaccagcgggttggcgatttacgacaccatgcagtatatccgcgccccggtgcatacgctgtgcatgggcaccgcgcgctcgatgggctcgttcctgctgatggccggcgaatcggggcaccgcatggcgctgcctaatgccagcctgcacgtgcaccagccgctgggtggctttcaggggcaggcctccgacatcttgatccacgccgaagagatgaagcgcaccaaagacacggtgattcggttgtatgcccaacattgcggcctaagttatgaagaggtggagcgggtgttggatcgcgatcgctttatgaccgccgacgaagcggcggcctgggggctgatcgatcgggtgctgcgggcgcgctaaagggctcaggagtgcgtggcggattgtagcgtttgccaaacccgttcaagtccgaattcgaccatcgcgaaatagagactaaaatagcgctccgccatgatgaagaacgaactgttgagttcgatcaccacattattggtggtggtcagcaggccggatttttccgccgcctgcagaatgcggttcacgtgcgcgcgtgagacggagcaggacttggcgattttcgccgaggagagcagcagaaagggggagtcctgtcggatgctttcgataaacaacatcaacagcaccatgtggccggcatctttgctgatgaacagcgcggattgcggcaccaggtcgatcaggtagacctccttgagcatcagttgcccgtaggcggcgaaaaaagtggacagaaagtcgggcgccgccagcagcgccgcgatgggcatctgtggcgccagcgcctgataagggcgcgccattgaggcgatcagcgcctgggtttccgccagcgcgtgcggcgtaggcttatagcgtaactggcgtttgtcatgctcgcagggtttgacctccagccggcgcccgacccgtaaaaagaacagaaaggaatccagggaattctcgctgatcatattcttccctttgaaaaaggctttgatgtctttcagcgcggcggcgtgctggtggtaataaatggacaggatggtggagcagatgatgaaccggctgttcctgaaaatgattttgtaaaacagcggatgcttcttgtaggtctccctcaataattccccgtgtttgacgatggcggcgtggaacgccggtgactgcctgatgatgttggcctgtttctccaggtgaaactgtagctggaatctgcttagactcattttccctatttcctgtacttaaaaaatgtgctgctttttatcgttatgggtttgctgtgtatggcttgacgatctgttggccctggtcgttgatgagagtggcctgaacggtgacctgagaagggagtgtcggcgctgcaacgccgtccaggtgataatctcgcgtgctgaacggcgcggtcatcatgtcgctttcttgccgcaccgggtaatcgcgcctgtcggcgtgcacggcgatgcgcgcgaacgagagataaaacgccgatcggttttgacagcgcagcagataaccgtccggcgatttttgcagcgtgaatgagacggcctcggtcgcgttctcggctttcccctgcagcgctctgggccggtagaagatcttcatctgggtgttcatcgccagcgtcacgcgcgacgccagcggcggcgtggtcggcgggttaggcgggatctcatacaggttgagccagaataccgactcccggtcggcgggcaggttagcgccggcaaacaggatgcgcagccctttcagcgcagaaggcggcagggcgaaaacgctgggcagggtgacaaacggcgcgcgggacagttcgggggcggcgttgacgtcaccgttatcgacccaggtttgcgccacgatcgggtagccgttggtgttgagcagcatcagggttttttccgtctcgccctcatgaaagatcacccgcgtggcggaggcgatgatgcccgcctgcgcgccgatggaagccagcgccagcagcagggcgcatcccatcgtcagatatttctttctcatcattgcaccttaacccagacgtaggccctggcgtccaccttgccggcggtgacggtttggccgggcagccgggcgagcgtggcggtgagctgggtggtgtagtgggtaaaccccgccgcggtgctgccgccgccgctggcgccgttgagcaccgggtaccagccggcgtcgttgccctgcgggcattgcccggcgctgcaacgcgcccagccgacaaagttcatcggcgcgccgttgccggcgttggcgagcgcgatgcccacgccggtggcgatgctgctgtcagtgccgtagccgctggagagcaggtagctcacgccgccgttggcgctgaccagcccgagctgctgcgccgcgacatagctttcatacggtacctgcaggccgagggcggtattgttgctgctgacgccggacacggcggcgttgtcgcattcgatattgatagtgaactgcgcctgtgaggtttgcccggcggtcaactggctgacggaaatggtcggcaggatcaccagcggcgtgacgttgcgcgccacgcaggtggcggtataggtcaatgaggagatcggtgcggtgcccatgcccatcgcgttccagcgcccggtgccccaggtggcgtagttggtggcggaatcgctgccgataggatccgaagcgatgccgggcccctgaaaggtaacatagccgttcggctgcgtgcaggtatagttcgaattgccggtggtcgacgccatgcccaccagcgggttgccggcgctgtagccgcagtagttgctggcgcccgcgcccggcagcgagctgatgcggatcagatcggcgcggatggcgctgaagtctttcacccggatctggattttgttgccgacggtggcgtagcgggtaatcggcgccgactgccagtaacgggtaaaaaccttgccggaatccaggtgggtcaaacggatgccgacgtaagggaagtaggtggcgtaatagttggggttgccgtccctggcgcccagatcgaaatagccgccgacgcgatcgtcgccgttggtggcgaagacttcataaatttgcccgacatcgccggcatcgcattcatacagcaccttgtttgggtcgggatagcgggtgccggaggtcagatcgaacacgctggtgccgagcggcgtgccgacgggctgcagataggtgctggtcaggttgacccggcccagcgccgtgcctaccccgcaaggatcgcagccggagtcgatccagggggcgacacgcgtgcattgcgccagcgccgcgggcgcgccgaacagcgacagggcgaacagcgccggggcggcgaccagataagaaatgtgtttcatcgtctctcctgagatcagttaaacgggctagcggcatggggcgctgagccgctgaatcgggctgtcttccgcggcgggcaggcgataatgcagcgtgcactgctggccgggcgcggcgccccagttcagcgtcagttcgccggcgctccgatcgctgcgtaggtacacctggttggcctggccgaccatgcccacgctgttgcctgccgcgtcaaggacgttggcgcccattgggatcggtgcgttatcgggccgctgtgcggtgatcagcagcgcctggccgcgcacggtgttgaagcgcaggcgcaccgtggcaccggcataaggagccacgcgccgctggccgtcttccagttccgctttgtcgttcatgccctcggggttcagcgcgacggtgttgtagtgatagggcaccagcgccggcgccagcgcatagccgaagcgatcgacgcgcgcgccctggccgtccatcacccgtgcgccgctggcgccgggcgcttcgatcagggcgaaggtgtcgccgacatacggccctaatgtcacgccgccgcggtgcgccaccaccgcgccctgcagcgacagggagccttgtcggtactggcgcgcggtggagaacgagccggtgacgttggcgtaaggcaggcgggtttgcaggttgccgccccagacgctttgttggcgatcgtcgtcggtggtgaagttcaggccgtaactgaccggctgttcgtcgccgacgctgcccgacagcgcagcctgatagttgccgccctgaccctggctgtggttggccagcagcgagacgctgggggcggatgatgaacgcccgagcgggaagctcagcgacagggcggtgacggtctgcgcgttctgcgccagcggcgcgctgtagacgttatccagcggcccgtagccgcggtagtcgccgttgctgtagcccaggctgcgggtgcgggtgacggagaggttaagcgccacgccgttgccgaaggttttcccccagcccagctggagctgattgtcgcggccgcgctgatcgcggtagtcctgagtcgagccggacatcgtcaggctgccgaacgcgcccatgccctgattgacggccacctcgaaacgcgaacgctggtggtaggagtcggactgccagttttggccggtaacggcggcgcgccgcacgccgagcacgtcgctgagatcgcgaaagccttcggtagagtagcggtagccggcgatggatagcgtggtgtccgtcgggctgaaagttcggctgtaagagaggtgcagcatccagccggaggcgccgccgtccggcaggctggcgtgggaataggtggtatccatgccgaaggcgcccagccagctgctgtacacgccgcccagcatcatcgcctgatagccgtccgccagctgattgccgaggttgaaggtcagggcgttggtcaggccgtgctgccaggtcacttcgctgaacagatcgttgtcgccgacgtagcgggaacggccgacgatggcggagtagcgcgactggccggggcgaatggattccggcaccgcggcgaacggcacggtgaaggtgctgacgctgccgtcggcttcggtcaccaccacggtcagatcgccggcgtagttggtggcgtacagatcgttgatggcgaacggccccggcgccacggtggtttcgtacagcgtgcttttaccctgcagcaccgtcacgcgcgcgttgcttttcgccacgccgcgcaccaccggcgcatagccgcgctgtgaatccggcagcatgcgatcgtccgagctgagctgaatgccgcgaaagcccaggccggagaagaagtgcccgtcggtaaagccttcgcccaacagcatttcgctgcgccagggcaggattgcgcgctgcacgtagcggcggctggtgtccaggtgaccgccgaactcccgatcgtagcggtagctggactgctggcggtagcgccagagcccgaggttgaacccgccgttcaggttggcgtaggtcgaatcgagatcgcgggtttgcccctgccggtagctgacgtggtactggttgaggttgtaattgacgaaggccattgattcgccgctgtccaggctggcgggattgacgctgccgcgcggccggccgttcaacagcgcctgcggaatgctgagatccagccgcagccgcgagatatcggcgttcaccatgatgtccttcagatcccggccgggcagcaggcatgccgtttcggccgccggcggatttttcagcccgaagcgcgtcagctgcggccgatcgaaacagggcagcacctgtttgcctgcgcgcacgaagcgaatttgatcgcgctcgagaaactggccgttgaggtacagatcgatctgatagctgccgggggcgacggcgtcctgctggttgaactgtctcagggcgctgttgctcagcacgctgccgcgcagcagcgcgggatcgaaggtgtagccgtcggcggcggcgcagcccaacggcaacgccagcagcgcgcagcaccagcgtgcgggcaacggcgtcgccttgcggacatcgaacatgaaaacctccctgtctggtttcagcgcgcgacgttcagggtgcgcgtgatttccaccccgtagtcattgatgacgcgcagcgcgacctgccgcacttccccgttcaccggccaattggcctgtgaaaacggcgggatcagatccgcctgcggaatggcgctgcgcttcgcgccgctcagaattaccgcctggctgacgttggcgtagtagccggtcgggttgtcgacgcgcagcgcgttgccgacctgacgcaggctaaggcgatcgatgacgtggttggcgtcgccggccagcccggccgggcgatagaacactttcagccggttggtgaccaccagcagcagtttgttcttgtcgctgtccgtctgacgcacggcggggacctgcaggaagttgaggtagaacagcgattcgcgatcgcgcgccagcggctggccgacgaacgacagccgcaccatttgcccgctgtgcggatccatgcggaagatttgcggcgaggcgacaaagggcgcatcggcgttttccggcgtggactgcgggttgttgatgtcgagccagatctgcatcagcgccggggcgccgtcatcgttggtgaactgcagcgttttctcccgcgcctcggcggggtagatcacgcggttgccgagcagcgttacgctggccaaggcgtgggtggcggcaaaactcatcaggcaaagcgacagggcggcccatcggcgggcggaacgggatatctgcggcataaacgtgaaccgataaagaagcgagtcattcagcgccgtccgctaaggaacggcgctggcatcaacaggtatggcgcctgacgccggcttatttgtagctaatggcgaactgggcggtggcgatcaccgaaccggccgccacgccggtgtcttccgcgtagtagcgggccaccaggttctgcgaggtggaggtggcgtctttcgccagcgtcatcgccgacgtggtgacggtcgaaccgctggcgaatgacagcggcgtggtggcgtcgctgtccagcagttgaatggacaccttggccgcatcgcccgcgttgcccagattgccgttggtggtcgggttgttgcccgccaacacggttttgatcgccgtatcgctggtcgccgccgcacaacccgtgacgttaacggtaaaggtggtgtcgccggcggtggcgcctttggtggcgagtttgctggcggcgacggttggcagcaacacgaccgggttggattggttgccgttaatattcaccgaacaggtttgcgtgctgacttcgcctttgaattgcacggtattggacgaggcggccgcacaggcgccggagagagccagcatggataatgcgactaatttaacattcatgtgaaataccctttaattaactttagagaaaagctttcctgacagtaataaattactgacgtgcgtttgttgattaatcatgttgcgcaattgttttttaaacgcgtcggcaaacatggattttcatcctaacaaactaagaattttccctataggtgttttccgcatggtaataagttggtggtgcgggttgttacatttattttcatttttgcttatatcatacaaaatggaaaatagatctatatcattgcgttgcgtttttattggatcgtcggtttttgtttatgaaataatttgaaacattcatgccttttttgcgtattaatcaaagtgctggctgttgcgtgattatttgaaaaacatgttatcaagttgttttatatcggtgtgctttgcaggcgaattaccccaaaaaagagcagcgacaagccgcctgaggtgtggaagcatactttcacgctgataaggagaattaaagtgagagtgatttatatcgacggttcgccgctatgccgtttggggatgaaaacattattgggagaaggagtgataaccttatcctcgcccaatattaatattattaaaaatataagccctgcgcctgatttaattatcatggattttccccatgaaatttaccggttcgaagcgtatttgcgatttattcacgcctcacgtgctgaatatgaaggcgtccggatactgttcttcgtcgataagacttcgccgctgatcctggcatttatcgcggcggcgcagccggatgcgattttgcacaaacgggaagcgctgcgggtggtgcgggaaacctgcgcggcgctagtccgccgtgaagagacgggcgaacggcgcgtggtgagccggcatcgggcggcggcgatcacgcctggcgaggcggcggtgttgtgtgaaaccgcccgtacggaagatatccgccagactgcgcggcggctgaatttgcacccgaaaaccgtttattcgcacctcaacaatgccggcaagaagttcggcatccgtaatcgggtggaactgctgaagatgattgcgctgctgtagcgcgccgttaacgggcctggcctacggccagccgccatcgcgtgatctcatcggcgccgggcccggcggccagcgccaggctttgcggcggcagagattcgccggtcacggcatctaccacgcgcagggtggcggggtggccggtcacgcggtcaactacgcgcagcggcggcccggccagctcggacagattccatttgtcgccaatctgaatcatcgccatcaccagcagcccgagatcttttcccttctccgtcggcagatactcgtagcgatcgggacgcgtctggtattgccgcttttcgataaggccgtggctttccagggccttgaggcgatcggtcagcgtattgttggtgatgccggtcgattggcgcaaatcgtcatagcgcgagagccccagcaatagatcgcgcatgagaatcgcgccccagcgatcgcccagtgccgacagcacgtgcgccaccgagcacgtcataccttcaaacccttttgctttcacgttgccttacctccgcttgccgcctgattgccgagaatgttatcgcctcggcttgataacttcaataattggagttattactcttattattggagtttatcattaacagcggctgatggcttgaacgccggccggaaaacctaggagataacgcgatgccactgtggcagatttaccacccggagccggccttcagcgccgccgataaacgcgcaatcgcacagaaggtcaccgccctgtatcaggactttttgccgcgtttttacgtcaacgtctttttccacgcgctgccgccaggatcggcgtatctcggcggcgaagcggccgatgatttcgtgcgggtgaccatcgaccatatcgcgcgcgccatggacaacgacgcagagcagcagcaattcctggcggcctgcacccgcatcctgcaaccctacatcgccgcacgcgggctgcgctgggagctgcacgtggacgaaacgccgttctcgctgtggaccattgacggattgaaaccgccggcgccggggacggcggcgggggagaggtggcgcagcgagaatcggccttcggtgtgggagggggataaccgcgagaaatggacataatgagcaacggtaaccgcttgtggactatgaaataatgcgtactgtatctgccgaaaaaaattgaaaggcagcctccaggaggctgtttttcggaagtgttagaatggataaaaatgtcgcttgcagggagaagccatgtctcattcatcagcgaggaaaaaagtgttgaatacagcaatgccgctggcacacagagcgtctcacgcgcgcagttgtgctaaccatgtggcgaaccggttgggaatgactcgcagtgagcttctaataaaagttgagaaagagtcaggctcaaatctggaatcaccgttaactgaagaagagctgatgaacgcattcaactatatggaaagcctttaggattaggccgctttaagccgcacaaacatctaatattgagcgttcagattggaaaagaggccagtaccgttctttaagcattgatcatgggatgggatactttaactctatttcaggtgcatcagctaaatgtctgccagagcgggccattaaatagccggcaatctcttcagttgtcagttcaacatggaacatatcaggatcctggaaccattcatccggccaaaaaatgaggtctgacggattgccatcaaaatttttctcaagcagtgcaagagcgaaattttgttcggattccttgcttttggcatcagacacacagcgaattgtctgaactaattcatcccaggtaaaatccatatagaatttttccagattgaaagccatgcgggtaaactcctcggcactggcccaggaggagaaatctctgaaatctgaaaacgtataggggcatgcaacctggctgttccatttgactatcattgcttctaaaacggaatcttgttcgtcaaaaccttcgtcaattcttgaaagtatctgcttagctttgtttgccagctcattgatctttttgctactgacttttgtgggtctcattcggtcaggtagaggcatcgctatcatccctgtctagcttactcatatccaatgggggaactatcttactgcagatgcggaagtattaagtagcataaaattcaatcatgccggatagatgggtaaactttccgttgcgcatcgcaatgttaagtacgtttcgcctccagcattagatcccaatagatcccaatctttactccgataagccaaaacgcagaaccgagagacaaaaaaatccacgccgaagcgtggatttttccgtttccggcagcggagagaaacgctgcggggaaggggttagacgttgaacaagaagttcatcacgtcgccgtctttgacgatgtagtctttaccttcggaacgcattttgccggcttctttggcgccttgctcacccttgtaggtgatgaagtcgtcaaaggcgatggtttgcgcgcggataaagcctttctcgaagtcggtgtggatcttgccggccgcctgcggggcggtggcgccgaccgggatggtccaggcgcgcacttctttcacgccggcggtgaagtaggtttgcaggttcagcagctcgtaaccggcgcggatcacgcggttcaggcccggctcttccaggcccagctcggccatgaactcgtcgcgctcttcgtcttccagctcggcgatatcggattccacagcggcgcacacggcaactaccacggagccttcggcatcggcgattttacgcacggtgtccaggtacgggttgttctcgaagccgtcttcgttgacgttggcgatgtacatggtcggcttcagcgtcaggaagctcaggtatttgatcgccgctttgtcttccgcagtcagatccagcgcgcgcagcatgccggcgttttccaggtgcggcaggcatttctccagcgccgccagctcggccttggcgtctttgtcgccgcctttggcttttttctgcacgcggtggatggcgcgctcgcaggtgtccaggtcagacagcgccaactcggtgttgatgacgtcgatatcttcggccggatcgaccttgttgttgacgtgaatgatgttgtcgttctcgaagcagcgcaccacgtggccgatggcttcggtttcgcggatgttggtcaggaactggttgcccaggccttcacctttagacgcgcctttcaccaggccggcgatgtcgacgaattccatggtggttggcagaatgcgctgcggcttgacgatctcggccagcttatccagacgcggatcgggcatcggcaccacaccggtgttcggttcaatggtgcagaacgggaagttggctgcttcaatgcccgctttggtcaacgcgttgaacagggtggatttgcctacgttaggcaggccgacgataccgcatttgaatcccatgttgtaatcaccttaaatatcttaactatcagctggttagatttaaccgactgcataaagggcaaaataatgccgccattatacacgtaatgggcgtttatctcgatcagacttgcttggccggggcgaacgcagcgcggacggccggtttttatttgagatttggatcacatttacccatactggccattccgattaaccgacaggaaacgcgccggatgtatttcttgcctacgccaccctgagctgtgcccgcctgcactctgccgccccttgcggctccccatacccgctacgcggggagatgatgtcatctgtcataagtgaataatgcatgtttaatctgagtaacgtcaggatcgcggacgttaaaaatgaagtcctggcgggctttgtggtggcggtttcgatgatccccgaggcggtcggcttttcgctggtcgccggtctttcgccaattgtcggcttgcataccgcgtttattatcggcctggtcacggcgctgttcggcggcaaaccgggcatggtttccggcgccgccggctccattgtggtggtgctgatgagcctggcggcgcagtacggcatgggttacgtgctgtgggccacgctgtttgccggggcgattcaaatcctgatcggcgccttccggctgggcaagttcattcgtctggtgccgctgccggcgatccacggcttcgtcaacggcctggcgatcgtcatcatgctggcgcagctgaagatgatcgccgggcaggggccgctgatgtacggcctggtggcgctggcgattgcggtggtggtgctgttcccgcgcctgaccaaagccattccgtcttcgctggcggcgctgctggtggtctcggcgttggcgatcggcctcaacctgcacacgctacgggtgggcgatctggcggacatttccggcgcgctgccgcactttagtctgccgacggcgccgtttaccctggagatggtgcgggtggtgctgccctatgcggtggtgatcgccctggtcggtttgattgaatcgctgctgaccatgacggtgctggatgaaatgggcggcaagaagggcaacggcaatcgcgagagtatcgcgcagggcgccggtaacgcggtatgcggcctgttcggctgcttcgccggctgcgcgatgatcggccagtcgatcatcaacttcacctcgggcgggcgcgggcgcatctccggtacggtgggcgccatcctgctgattctgttcgtggtcagcctgtcgcgctatatcggcctgctgccggtggcggcgctggccggggtgatgctggtggtgtgttacaacaccttcgagtggagctcgctgcgccgcttgcgccgcatgccgaaagccgacgcgctggtaatgatcgtcgtcacgctgatcaccatctttaccgatctggcggtggcggtgatcagcggggtgattatctcggcgctggtgttcgcctggcagcaggcgcgcatccgcgtgcgccagcggcaggtgacgggcgacgtggcggtgtatcaactggatggcccgctgttcttcggctccgccgccgctttcgccgagctgttcgatccgcagaacgatccgcagagcgtggtgctggattttgccggcacccgggtgatggattccagcggcgtggaggcgatcgataagctgacggcgcgttatctggcggcggggaaaagcattcgtctgcgccacctgagcgctgactgcgtgcgcctgctcaaacgcgccgggccgttctgcagccatgagctggacgatccgcagtattacgtggcggaagagggcttcacctccgatgagcgccgggtgggcgaggaaaccttcaacccgcgcggctaaaagcaagcagcgggcagggcgcccgctgcggcaaggatcaggcctgcgccttgaagctgtgcaggcgctgaacggttttttccagcccgtccttcatcagcatttcggtgcagcgcagcgactcgtcgatcgcttcgtcaatcatcttctgttcgctggccggcggcttgccgagcacgaagcccaccaccttgttcttgtcgcccggatggccgatgccgatgcgcaggcgatagaagttcgggttgttgccgaacttgttttggatgtctttcaggccgttgtggccaccgttgccgccgccgagcttgattttggccacgccgggcggcagatccagctcgtcgtgcgccaccaggatctcgctgggttcgatgcggtagaagttggccatcgccagcaccgctttgccgctcaggttcatgaaggtggtcggcaccagcaggcgcacgtcgttgcccgccaggttcaaacgggcggtgtagccgaagaacttgctctcttcttttaactgctgattgtggcgctgggccagcagatcgacgtaccaggcgccggcgttgtggcgtgtctgggcgtattccgcgcccgggttggcgagaccgactatcaatttaatactgctcactgggagattcgctatgatcagggtaatggaaagggccttagtctacctgtcggggcgatgaatgacaaaacccgatctctgccgtcaccctgggtaagaaagacgaatgattcattagctgaataattcaatttgtccgctaattttcagtgccgtgttaagaagtgtcaataattctttaccatttgtgatcgcctccgcaatccccttgccgcaacagggactatacttaacttatcaaagtgggttaacaagttgcagcgttatcccggttggcacatggcaatcatggaggtggcatatgaaacgtagaagcgcggacagagtgggcaacttttttatggggctggggctggtcgtgatgatcggcggcgtcggatactcaattattgctgaagtatcccagttcaatctgccgcaatttttcgcccacggcgccatcatgagcatcttcgtcggcgcgctgttgtggctggtgggcgcacgtatcggcggccgcgaacaggtggcggatcgctactggtgggtaaaacactttgataaacggtgccgcaacgatcaacatcgttcgtcgcattgattaaaaaagcagaagggaagcaagagcggggcaagggaacatctgccgtgcattaaggtttgaggtcatgtcggagtacaagtagaaaacccgttgttgctcgcgcaccaacgggtttttcttttctgctgtcgggctcgctatctttccggcgcagtgggcgccgcaccggaaagacgacgaaattaatgctcgaacatcgcagagatcgactcttcgttgctgatgcggcggatggcttcagccagcatgccggacagggtcagagtgcgaacgtttttcagtgccttgatttccggcgacagcggaatggtgtcgcagacgatcacttcatcaatcaccgagttcttgatgttgtccacggcgttgccggagaagatcgggtgcgtcgcgtaggcgaatacgcgcttggcaccgcgttctttcaacgcttcagccgctttacacaaggtgccgccggtgtcgatcatgtcgtcgaccagcacgcagtcgcggcctgccacgtcaccgatgatgtgcatcacctgagaaacgttcgcgcgcgggcggcgtttgtcgatgatggccatgtcggtgtcgttcagcagtttggcgatggcgcgggcgcgcacgacgccgccgatgtccggggaaaccacgatcgggttttccaggttctgctgcagcatgtcttccagcaggatcgggctgccgaacacgttgtctaccggtacgtcgaagaagccttgaatctgctcagcatgcagatccaccgtcagaacgcggtcaacccctacgctggagaggaaatcggcaaccaccttggcggtgattggcacacgcgcggaacgcacgcggcgatcctggcgggcatagccgaagtaagggataacggcggtaatacgacctgcggaggcgcgacgcagggcgtcgaccatcacaaccagttccatcaggttgtcgttggtcggggcacaggtggactggatgatgaaaatatcaccgccgcgtacattttcgttgatttgcacgctcacttcgccgtcgctaaaacgacctacagcggcgtcaccaaggctggtgtacaaacggttggcaatacgttgtgctagttccggggtggcgttaccagcaaaaagcttcatatcaggcacgagaagaacctcaggcttgcgtccagagaagatattgtcatacgacatcgccaaggggcagtcggcgacgccggcgcaatatacatacgggtatgtaaaactaaaattgagaccgcaggcagcgcagggataacagggccaggtgtgcatgaccctgcgcagcgaaacgttgagctacgactcaaaccgcccggaacgaatgcgatgtagtggggagacgttaacgccgcgcgctacaaaaccacacaaccactccggggcttgatttaacacctgacgggcagcgatttctgtgtcgaattcagcaaacacacaagcacctgtgccagtcaggcgtgacggggcgtattctaacagccatgaaagaagctgttcaacctcgcgaaaacgttttcttgcgatcggttcgcaatcatttgcgtacggcgcctgcaacagctcacttaaggagcgaaccggggtgtcccttttcaattcggcgtcgccgaagataaccggcgtcgggatgccgacgccgggatgcgccaccagataccatttttcctgcggctcggccggctgcaggcgctcgccgatgccttcggcgaaggcggcgtggccgcgcacgaacaccggcacgtcggcgccgaggctgagccccagctctgccagttggtcgtcgtcaaggccgcagcgccacagttcgttcagcgccaccagcacggtggcggcgttggaggagccaccgcccaaaccgccgcccatcggcaggcgcttgtcgatgctgatgtcggcgccgcgcggtgcggtctgcagaccctgttcatcacaatagcgctgcagcaggcgggcggcgcgcacgatcaggttctgctcgtccggcacgccgtcgaccggcgtcagcaggttaatgcgatcgtcctggcgcgggtcaatggtcagggtgtcgccgtagtccaaaaactggaacagcgtctgcagcaggtgatagccgtcttcacgacggccggtgatgtacagaaacaggttgagcttcgcgggggagggccactggcggatcatttgagcgtccagttatccattttcagtttgatgcgttggtcgccctgctgcagctccagacggttcggcagcgtcggctgcacctcggtgctgtagctctggtaatccaccttccaggtttgaccgccttgctggtaggtcagtttgctcaggcgatattggtcatccagcgcaaaatcgctggcttcgcccggcaggccgaccatccactggcgcaggttgttcagcgggatcgccatcccggtcagcttgcggatcatctcttccgggttgtcgctgacgtagcgtttgccctggttgtcggtcagctgcaccacgtttttctgtacgttgagatccatttccgtgctgcccagcgggttagtcagcagcaggcggtagcgctccggcgaaaactgctgccagaagaagcgggcatagacttttttctgatcagacaagtaggcgaaggagccgcgggtctgataggtgctaagctgctgcaccgcctgctcatgggcgcgccactgcggtgaggtcgggctggtggccgggccggttggcttggtggtggtacaggcggccagcaccaggctggccagcgggatcagacggagcaaactaactttgcgtattggcataactttttcttgtccttttgtccttgcgggcatgcgcgacgaaacccggattcagcgctcacgctaacggggcggcggcggcgcgtcaattttttgctgcatcgcgttgaatcttgccgcgtttatcggcgtagtgccaacgcggcgcgcgcgtcggggttgccattaagcgtaacacaatcgcctgaaggcgggggaggcgctcccgataagcggtgcagagttgcgcaaacgccaacgttatgtgcgccgaatagcgtgcgcgtcttcgcaaactgcgctaaaatttaaaccatctgcctaccctttgactatttatcccgctgtatttattacttattcattaattgatgtcgtctatgacagcgattgaacggaagatgcggttgttacttttattgatcccgcgcatcaagtagaatgccgttcaacgagaacccgtaccaacagaagtattactcgaagcaatgaccctgctggcgttaggtataaatcacaaaaccgctccggtttctctgcgtgaaagggtgaccttctcgccagagtccatcgatgaggcgctgaccagcttgctccaacaaccgttggtgcagggcggcgtcgtgttgtccacctgcaaccgcaccgagctgtacctcagcgtggagcagcaggagcacatgcacgaacagctggtcgcctggctgtgcgcctaccacaatctgcgtccggaagaggtgaagaaaagcctctactggcatcaaggcaatgacgcggtcagccatctgatgcgggtggccagcgggttggattcgctggtgctgggcgaaccgcaaatcctcggccaggtgaaaaaggccttcgccgaatcccaacgcggccagtcgctgtccggcgagctggagcgcctgttccagaaatccttctccgtcgccaagcgtgtgcgcaccgaaaccgaaatcggcgccagtgcggtctccgtggcgttcgccgcctgtacgctggcgcggcagatcttcgaatcgctggccgatctcaacgtcttgctggtgggcgccggtgaaaccatcgagctggtggcgcgccacctgcgcgaacacaaagtgcggcacatgatcatcgccaaccgcacccgcgagcgcgcgcagctgctggcggacgaagtcggcgcggaagtgatcaccctgccggaaatcgacgaacgcctggcggacgccgacatcattatcagttccaccgccagcccgctgccgatcatcggcaaggggatggtggagcgggcgctgaaagcgcgccgcaaccagccgatgctgctggtggatatcgccgtaccgcgcgatatcgaaccggaagtcggcaagctggccaacgcttatctgtacagcgtggacgatctgcacgccatcattcaaagcaacctggcgcagcgcaaagcggcggcggtgcaggcggagtcgatcgtgcagcaggaaagcaccaacttcatggcttggctgcgttcgcagggcgcggtggaaaccattcgcgactaccgctcgcaggccgaccagatccgcgcagagatggaggccaaagcgctggcctccatcgcgcagggcgccaacgtggagcaggttattcacgagctggcccataaactgaccaaccgtcttattcatgcccctaccaaatccctccagcaggccgccggcgacggtgacgtggagcggttgcagttattacgcgacagcctcgggctggatcagcattagttttctctattaacagggtttattaccacgcatgaagccttctattgttgccaaactggaagcgttacaagagcgccatgaagaagtgcaggcgctgctcggcgatgccggcgttatcgccgaccaagaccggttccgcgcgctgtcgcgagaatacgcgcagctgaccgacgtcagccgctgcttcctggaatggcgtcaggtgcaggaggatctggagacggcggaaatgatgctggacgatccggaaatgcgcgagatggcgcaggaagagctgaaacaggcgcgggcgagcagcgaagcgctggaacagcagctgcaggtgttgctgctgccgaaagatccggatgatgagcgcagctgtttcctcgaagtgcgcgccggcaccggcggcgatgaggcggcgatcttcgccggcgatctgttccgcatgtacagccgttacgccgaaggccgccgctggcgcgtcgaggtgatgagcgccaacgaaggcgaacacggcggcttcaaagaagtgatcgccaaagtttccggcgacggcgtgtacggccagctgaagtttgaatccggcggccaccgcgtgcagcgcgtgccggaaaccgaatcccaggggcgcatccacacctccgcctgcaccgtggcggtgatgccggaagtgccggaggccgaattgccggacatcaacccgggcgatctgaaaatcgacaccttccgctcctccggcgccggcggtcagcacgttaacaccaccgattcggcgatccgcatcacccacctgccgaccggcatcgtggtggagtgccaggacgaacgttcacagcacaaaaacaaagccaaggcgatgtcggtgctgggcgcgcgcattcgtgccgccgagatggccaagcgccagcaggccgaggcgtccactcgccgcaacctgctgggcagcggcgatcgttccgatcgcaaccgtacctacaacttcccgcaggggcgggtgaccgaccaccgcatcaacctgacgctttaccgcctggatgaagtgatggaaggcaaactggacatgctgatccagccgatcgtgcaggagtatcaggccgatcagctggctgcgctgtccgccgagcaagagtgatggattatcaacactggctgaaagccgccgccgcgcgtttgacccacagcgacagcgcccggcgtgacgcggaaatcctgttgggtttcgtgaccggcaaggccagaaccttcctgatggcgttcggggaaaccctgctgacgccgccgcagcaacagcagctggagacgctgctggcgcgccgcgaacgcggtgagccggtggcctatctggtgggtgagcgcgagttttggtcgctgtcgctgtcggtctcgcccgcaacgctgatcccgcgcccggataccgaatgcctggtggaactggcgctggcgcgcctgccgccgcaaccctgccacttcctcgatctcggcaccggcaccggcgccattgcgctggcgctggccagcgagcgcccggattgttcggctatcggcgtcgatgtgcagccggaggcggttgcgctggcgcagcacaatgcgcacaagctgaagatcgacaacgtccgatttttacagggcagctggtttgcgcccgtcgcggggcaacgtttcgcgctgatcgccagcaatccgccctatatcgacgccgccgatccgcatttgtcgcagggcgacgtgcgcttcgagcccggtagcgcgctggtcgccgccgagcacgggttggcggatctggccgccatcgtgcgccaggcgccgcactatctgcagccgcagggctggctgctgttggaacatggctggcagcagggtgagagcgtgcgcgcgctgctgcaggccgccggattttccgctgtcgccacccaccgtgattacggcgacaacgaccgcgtgacgctcggccaatggccgggataagcgccctcataataacgacgcccgagccatttaagggagcatcatgactgcatacaccgcgttgaaacatttccatttgctgacggtcgccatcagtattaccttgtttgtgctgcgtttcttttggcagtggcgccgttcgccgatcatggggcgccgctgggtcaagatagcgccgcacctgaatgacacgctgctgttcgtcagcggcatcgcgctggtggtgacgttcgggttttatccgctgctgggtatggactcatggctgaccgagaagctgtttggcgttattatctatatcctgcttggctacgtcgcattgggcaagaagaccaaaagtcagcggctgcgaaccgtggcgttcgtgctggcattgggctgcctgtacctgataattaaacttgccacgacgaaaataccgtttctgatgggatacctatgagtagcattgctgattttgaatttaacacctcgccgctgagcgaaggggtgatcctggtgtcgcagtcggtgcggcgcgatttcccggctgccgacgtggagcgcaagctgcaacaactggtggacgaagcgcgcgcggtggtgccggccgatatcactcaggagcagcaactggatgcgctcattgaactgttctacaagacctggggattcggcggcgccagcggcgtgtaccgcctgtcggacgccatctggctggacaaggtgctggaggggcggcagggcacgccggtttcgctcggcaccatcttcctgcacatcgccaacgcgctggatctgccgctgctgccggtgattttccccactcagctgatcctgcgcgccgattggctggatgaagagctgtggctgatcaacccgctgaacggcgaaaccctgagcgaacaccagctggaagtgtggattaagggcaacctgggcttgggtgccgagctggaagacgacgatctcgacgaatccgagaacatcatggtggtgcgcaagatgctggatacgttgaaggccgccctgatggaagaaaagcagctggaaatggcgctgcgcaccagcgaaacggtgctgtgcttcgatccggaagatccgtacgagatccgcgatcgcgggctgatttacgcccagctggagtgcaaccatatcgcgatttccgatctcaactattttgtcgagcagtgccctgaggacccggtcagcgaagtgatcaaagtgcagatccattcgattgagccgaaacaggtgacgctgcattaattcaatgactccgtgcagtttgcaaggcgacggttacaaccttaacaaaggcgaaagcatgaaacagaaagtggttagcattggcgacatcgacgtagcaaacgatctgccgtttgtgctgtttggcggtatgaacgtgctggaatcgcgcgacctggcgatgagcatctgcgagcactacgtcaccgtgacgcaaaaactgggcattccttacgtattcaaagcctctttcgacaaagccaaccgttcttccatccactcgtaccgcggtccgggcctggaagaagggatgaagatcttcgaagagctgaagaaaaccttcggcgtgaaaatcatcaccgacgttcacgaagcggcgcaggcgcagccggtttccgaagtggttgacgtgatccagctgccggccttcctggcgcgtcagaccgatctggtggaagcgatggcgaaaaccggcgcggtgatcaacgtcaagaagccgcagttcgtcagcccggggcagatgggcaatatcgtcgacaagttcaaagagggcggcaacgaccaggtgatcctgtgcgatcgcggcagcaactttggctatgacaacctggtggtcgacatgctgggcatcaacgtgatgaagaacgtgaccggcggccatccggtgatcttcgatgtgacccacgcgctgcagacccgcgatccgttcggcgccgcgtccggcggccgtcgcgctcaggtggccgagctggcgcgtgccggcatggcggttggcctggcagggctgttcctcgaggcgcacccggatccgaacaacgccaagtgcgacgggccgtctgcgctgccgttggacaagctggaaccgttcctggcgcagatgaaagccatcgacgacctggtgaagagcttcccggagctggataccagcaactaagcgctcatcgccaaaaaaaagcccgacgcgtcgggcttttttacgtttaggcgccggtggccgccagcgcttccggcagcgtcgggtagaactgcaagcggccctcgatcggctgcacccgcgcgcgcgccagggttttcagcggctggaacggcacgtcggtgatcaccagctttttatccgccggcagcgcgtcgataaagcgccgcagggcgctcaggccgccggcgtcgagcaccggcaccgcatcccactgcagcacgatcgtccggtaatcctcgctgcgcgccagcagttcgctaaagatgcgctcggcggcggcgaagaacagcgggccattcactcgcagcaccaggcggccatcgtcggcgctcagctcgctcagccgcgtcatgcgggcgatgcgacgcataaacagcagcgacgccaacacgatgcccacggtaatggcgatcaccatgtcgaacagcaccgtcagcgacatgcacagcagcagcaccagaatgtcgtccttcggcgcccggcgcagcaggtaaatcactttgtgcgcctcgctcatgttccaggcgaccatcaacagcagcgccgccatcgccgccagcggcagataagagagccacggcgccagaaccagcagcgccaacagcaccagcagcgcgtggatgatggcggaaaccggcgaggtggcgccggcgcgcacgttggcggccgatcgggcaatcgcagcggtcgcggtgatgccgccgaagaacggcgcgatgatgttgcccgcaccctggccgattaattcgctgttcgagttatgcttcttgccggtcatgccgtcgagcaccaccgcgcacagcagcgattcgatcgccccgagcatcgccatcgaaaacgccgccggcaacagggcggaaacggtttgccaactcagggtgaacggctgcccgccgccgcccggcagatcccagggcagcagcagctgtggcaggatcggcggaatgccctggccgctgctgccatcggccagcaggtagctgaagcgggagccgatggttgccactgggtggtcaaacagcgtcagcagccccatcagcgcagtgcccgccagcagcgccggcaggtggccgggcacccgcaggccgagcttgggccagaagatcaaaatcagcagcgtcacggcgccgatcagggtatcgccgatatccagcgtcggcagcgcctgcagcagggcgtacagcttgccgacgtaattttccggcgtgtgcgtcagctgcaggccgaagaagtccttgatctgcatggtggcgatggtgatggcgatgccggaggtaaagccgagcgtgaccggcagcggaatgtactcgatcagcctgccaaagcgtgcgagccccatcagcagcagaaataccccggagatcagcgtggcgaccagcagaccggccaggccgaactgctgcgagaccggatagaggatcaccacgaaggcggcggtggggccggagacgctgtagcgcgaaccgccgctgacggcgatgacgatgccggcgatggcggcggtatacagaccatactgcggcggcacgccgctggcgatcgccaacgccatcgccagcggaatggcgataataccgaccgtcaccccggcgatagcgtctttcagcaaccgcgccaggttataaggttcccgccagcaggcgtctatcagcgcgctgaaggggcgaattttgtttatttcatgcgttttcatctacggtgcgtaccaaatcttcaaaagtgaaaggaatggcgggcccgatgaggtccgtcttgtcacgtgacagataccatacgccttttgttcagcggattaccagacctgtatcaatttggcgcaggaaatcagagagtcgcccttttgttcggcgctaaatttcgataatagagaagtcagccgcagattctgcggctgaaaagaaaggtgacagtcaaggttttaacggttattgcagggcgggcagggataagccgagaaaatgggctaaagtgctcaccagcagctgatgatcttccttctgcggcgcgccggaaatgctgatgctgccgacgcagccgaggccggtcagggtgagcgggaaggcgccgccgtgcaccgaatagtcacgcacgctcagcccgtaacgctcctccagcgacgtttgccgctgctgcaggcgcaggccgatggcgtaagagcttttgtgaaaaaggttcaccagattgcgcttgcgccgcacccagtcggcaatgtccggcgttgcccccggcatggcgtaataaaacagcgtctgcccggccagttggatctcgatggcgatgctcaggccgcgccgctcggcggcggttttcagcgccgcgcccagttcccaggcggtggcggcgtcaaaatgggtaaaggccagcgtcgcttcctgttcgctgagcgcttgcagttcatcgtcgatattcatgcggttctcccccgataacacaacgcacagagtagcctgaagcgggcgtcgtgagatagacggcttggcgataagatagaactgctactctattaatagactgtgtaaaatggccgccgccgaagcggagacgacagggatgcgttattcaacgtctgcacattaccccctggcgatcccgaggagcgcgctgactatttatgacttacattgcgtccatttctaccctttacagcgacgcctgcatcacctacgccacgctgtcgataagctatttccttctcagcaagaatgcccctttttcttatcaatccgcactgtggaagcgggttgttttcggcctgctggccggggtggcggtgctgtatttgagccaggatcggctggagctgaccgataaggtgcattacagctttgcgatgatcccgatgatattggtgactttcttcggcggcggcgtcagcgggctggtgagttttctgttcgccatgacgctgaccggcggtttcaccgtcgataacctgttcatcgcctcgatcgtcgcgccgctgctgttgtcgcgcgtgtggctgaaaaaatcccaccggacgttttacctgacgatcggcatcatcgcgctgtatcgcatcgcggtggtgtggctgctggtggacatgagcgggctgtggccggatgtgttgctgtaccaggcggtttccgcgctctgtctggcgatttgctatcatgcgctgaatttcaaagagcgccatatctacgcctatttcgcgatgcgcgcgcgcgccaccaccgacagcctgacccacatcaacaaccgcgccagcgtcgattatcagctgatgctgcagcgtgccgagcgccgcccgtgcgggctgatgatcctcgatttggataacttcaaaagcatcaacgatacctacggccatccggccggtgacgtgctgctggccagcgtcggccggctgctgcaaaacagcgtgcgcaatgaggacttcgtcgggcgctacggtggcgaggagtttatggtgatcaccgccagctacgatccgcaggtcatcggcggggtggcggagcgcattcgcagcgcggttgaaagctcgacgttcttgctgaatgcgcacgacgaagcgcacatcacgctgtcgatcggcgtgtcgctgtatctgccgggcatgaggctggacaaggcgatcgccatgaccgacgaggccttgtatgaggcgaagcgcagcggcaaaaaccgggtggtgaccagccgcgtgatgcagctggcgccgctgggcgccggattcccgcgcgaataagccgcccccgccgccacggcgggggcattggctcagaccgccagcgtgtgttcgcggaaggcgttcagcagctcttcggtgaacgccaagcgtttttggcgatcggccagatcgagcgtgaacttcagcttgctcgggccgtccaggcggtaaacctgcggattgccctgcaacaggccgatcagataacccggatcgacgcggttgttgtcgccgaactcgataaagccgccgcgctcgttgctctcgatgcgtttgatccccagtttctgcgcgtgcaggcgcagcgccgcgcactgcaacagattgcgcgccgcatccggcagttgaccgaagcggtcgatcagctcgaccttcagctcgtcaagctcaccgtcgttcttcgcgctggcgatacgcttatacagcgacaggcgggtattgacgtcgggaatgaaatcttccggcagcagcgccggcatgcgcaactctacctcggtctggttgctggtgagatcttccagcgacggttcgcggccgtttttcaacgcgtcgacggcgctttccagcagctccatatagagcgagaagccgacggtggtcatctggccgctctggtcttcgcccagcagttcgccggcgccgcggatctccagatcgtgagtcgccaacgcgaaaccggcgccgagatcttccagcgacgcgatggcctcgagccgtttatgagcgtcggtgcccatggctttcgggtttggcgtcaacagataggcgtaagcctgatggtgcgaacgcccgacgcggccgcgcagttggtgcagctgcgccaggccgaagcgatcggcccgctcgatgatgatggtgttggcgctggggatatcgatgccggtttcgatgatggtcgtgcacaccagcacgttgaagcgctggtggtggaaatcgttcatcacccgttccagatcgcgttcgcgcatctgaccgtgaccgatggcgatgcgcgcctccggcaccagctcagccaggcgttgcgccgctttctcgatgttttccacgtcgttgtagaggtagtaaacctggccgccgcgcagcacttcgcgcaggatcgcctcgcgcaccaccagactgtcgtattcgcgcacgaaggtcttcaccgccagccggcgcgccggcggagtggcgatgatcgacagatcgcgcatgccgctcatcgccatgttcagcgtacgcgggatcggcgtggcggtcagcgtcaggatatcgacgtcggcgcgcatcgctttgatgcgctccttgtggcgcacgccaaagcggtgttcttcatcgacgatcagcagccccaaatccttccagcgcagatcgctctgcagcagtttgtgggtgccgatgatgatgtccactttgccatcggccgcgtcgtccagcacctgctgctgctctttggcgctgcggaagcgcgacatcatctcgatgcggatcggccaggtggcgaagcgatcgcggaagttgtcgaagtgctgctgtgccagcagggtggtcggcaccagcaccgccacctgcttgccgttttccaccgccaggaaggcggcgcgcatcgccacttcggttttgccgaagccgacgtcgccgcacaccaggcggtccatcgccagcggctggcacatgtcgctcagcaccgcgttgatcgcctgttcctgatccggcgtggtttcgaacgggaaggtctggcagaacagctggtattgttcgcggttatgcttgaaggcgaaaccggccttggcggcgcgctgggcgtaaatatccagcagctcggccgcgacgtcgcgcacccgttcggccgctttttgccgcgcgcgtgtccaggcgtcgccgcccagtttgtgcaacggagcgttttcatccgcgccgccggcgtagcggctgatcagatgcagcgaagacaccggtacgtacagcttgtcctcaccggcgtaggagaggatcaggtattcagccttgatgccgccggcttccagcgtggtcaggccgacatagcggccaacgccgtgctccaggtgcaccaccggctggccgggatgcagctccgccaggttgcggatcagggtatcggtgttgatggtgcgccggttgtcctgccggcggcggctgacgcgctcgccgagcagatcgctttcgcagatcagtgcacgctggcgcaggccgtcgaggaagccgtgttcggcggcgccgaccatcatgtaacggcccgcggtttccgcctgatcgagacgctggatcagcgccggcgccagcttgatgcggccgagcagatcctgcagcgtttcacgccgcccctcgctctcgacggagaaaatcacgctgccgacgaagccttcgataaaacgccgcagattatccagcggggatttatgctgcgcctgtaccgccagatcgggcagggcatggtaatccagattggtattgccggccttggccggcagctcatcggttttcagcgcgatgcgcggccaggctttcagctcgccgaacagcgcgtcaacgcgcagccacagcgtatccggcgccagcagcgggcgcatcggatcgacgcggcggctttcgtaacgctggttgacgtcctgccagaagcgctcggcggcgccctccagatcgccggtattgacgatcagcgtattggtcggcaggtagctgaacagcgacggcagcggctggctgaagaacagcggctgccagtattcgataccggcgggccaggcgcttttgctgacctgctgatagatgtgctcggcgtcgcgacgcacctcaaactgctcgcgccactggctgcggaacagctcgatggcgttcttgtcggtggggaactcgtgggccggcaacagattgatggcctcgacttcgctcagcgtgcgctgggtatcgacgtcgaagatgcgcaggctgtcgatttcgtcatcgaagaagtcgatgcggtaaggctcatcgctgcccatcgggtaaagatcgagcaatgcgccgcgggtggcgaattcgccgtgctccatcacctgatcgacgctgcggtaaccggcctgttccagctgcgcgcgcagcttatcgcgcgacaggcgctggcctttcttcatcaccagcgcgtggccgtgcaggaattcgtgcgggcagacgcgctgcatcagggtgttgaccggcagaatgatcacgccgcgcgccatggtcggcaggtgatacaggctcgacaaacgatccgagatgatttcctgatgcggcgagaagctgtcgtacggcagggtttcccagtcggacagtgtggtcaccatctgatcggtgaactgctggatctcgtcgcgcagccgcagggcgttttgcatatccggcgcgatcagcatcaccgggccagggtggcgctcgacgatctcggcgcactccacggcgcaggccgcgccggtcagttgccccagctggcgcagatcgcccgcgcgatcgggcagagaataacgaggggatgaagaacggttacggctatcggaagtgctcattcaggtatctttaatcaatgtgttagagggcgtcccggcacggataacccagtgcttttatgctgtttatagtagcccagcggccggcaaactgacacagcaaaaagcgctgcccatcgcttttttgccggttatttaaccggttaacgtcgtcgattttttgcagcgacgggtaaatcttgcgctaatctgccgccaccgctctcgtctgcgccacgcaataaaaggccgtcgggtgttccctaaacgagggagagcctttattatccatgatcactttgcttaagccacggctatcaaacggatttcatgtatcaacctgtcgcgttattcattggcctgcgctacatgcgcgggcgagcctcagaccgctttgggcggtttgtatcctggctttccaccatcggcattacgctgggggtgatggcgttggtcaccgtgctgtcggtgatgaacggtttcgaaaaggatctggagaacaacatcctcggcctgatgccgcaggcgctggtcaccagtccgcaaggatcggtcaacccgcagcagctgccggcctccgaggtgcagaagctgcagggcgtcacgcgcgttgcgccgctgaccaccggtgacgtggtgctgcaaagcgcccgcagcgtggcggtaggggtgatgctcggcgtgaatcccgacgaggccgacccgctgaccccgtatctggtcaacgtcaagcagcaacagctgcagccgggccaatacaacatcatcatcggcgaacagctggcggggcaacttggcgtcaagcgcggcgattcgctgcgcgtgatggtgccgagtgccagccagttcacgccgatgggccgcattcccagccagcgtttgttcactctcatcggcaccttccacgccaacagcgaggtggacggctatcagctgctggtcaaccaacaggatgcttcgcgcctgatgcgctacccggccggcaacatcaccggctggcgtctgttcctgcaacagccgctgacggtcgataccctcagccagcaggcgctgccggcgggcaccgtctggaaagactggcgcgatcgcaagggcgagctgttccaggcggtgcgtatggagaagaacatgatggggctgctgctcagcctgatcgtggcggtggcggcgtttaacatcattacctcgctcggcctgctggtgatggagaagcagggcgaggtcgccattctgcagactcaagggctgactcgccgccagatcatgtcggtatttatggtgcagggcgccagcgccggcatcatcggttcgctgctcggcacgctgctcggcgtgctgctggctaccaatctgaacaatctgatgccgatcctcggcgcattgatcgacggcgcttcgctgccggtggcggtcgatccgctgcaggtgacgattatcgccgtggtggcgatggcggtttccctgttgtccacgctctatccttcatggcgcgctgccgccgtacaacccgctgaggctttacgttatgagtaaccatcttttgctgcagtgtgacaacctgtgcaagacctatcaggaaggcaacctgcacaccgacgtgctgcgcaacgtcagctttgccatgcagcagggcgagatgatggcgatcgtcggcagctcgggttccggcaagagcaccctattgcacctgctgggcgggctggactcgccgacctccggcgaggtgatcttcaagggcgaatcgctgaacgccatgtcttcggcggccaaggccgagctgcgcaaccgccagctgggcttcatctatcagttccaccatctgttgccggacttcaccgcgctggaaaacgccgccatgccgctcttgatcggcggcgccaagccggctcaggcgcaggagaaggcgcgggagatgctggcggcggtcgggctggaaaaacgcagcaagcaccgcccgtccgagctctccggcggcgaacgtcagcgcgtggcgatcgcgcgcgcgttggtcaacaacccggcgttggtgctggcggacgaaccgaccggtaacctggataaacgcaccgcggacagcatcttcgatctgctgggcgagctgaacgtgcgccagggcaccgctttcctggtggtgacacacgatctgcagctggccaagcgcctgagccgccagctggaaatggccgacggccacctgcaggcgcagctgaccctgatgggggccgagtaatggcgggagcctcactgtccttcctgacggccctgcgtttcagccgcggccgtaaacgcggcggcatggtgtcgctgatctcggtcatctccaccatcggcattgcgctgggggtggcggtgctgatcgtcgggctgagcgcgatgaacggctttgagcgcgagctgaagaaccgcattctggcggtggtgccgcacggcgagcttgagccggtcaatcagccgttcagcggctggccgtcgattctgcagcgggtggaaaaggtgccgggtatcttggccgccgcgccgtacattaactttaccggcctgatggaaaacggcgcgcagctgcgcgcggtggaagtcaaaggcgtggatccgcagcaggagagccggctgagcgcgctgccgcagtatgtgcagggcgacgcctgggccaacttcaagcccggcgagcagcaggtgatcctcggcaagggcgtggccgacgcgctgggcgtcaagcagggcgcctatgtcacggtgatgatccccaacagcgacccggagatgaagctgctgcagccgaagcgcattcgcctgcatgtgaccggcattttgcagctcagcggccagctcgatcacagcctggcgctggtgccgctggccgacgcgcagcagtatctcgacatgggtgacagcgtcacgggtatcgcgctcaagatgaacgacgtgttcgccgccaacaaactggtgcgcgacgccggcgaagtgaccaattcttatatctacatcaaaagctggatcggcaagtacggttacatgtaccgcgatatccagatgatccgcgccatcatgtatctggcgatggtgctggtgatcggcgtggcctgcttcaacatcgtctccacgctggtgatggcggtgaaagacaaaagcgccgacatcgcagtgctgcgcaccctgggcgctaaagacggctttattcgcgccatcttcatctggtacgggctgttggccgggctgctgggcagcctgagtggcgtggtgatcggggtgatcgcttcgctgcagctgaccaacatcatccggggcatcgagaaactggtcggtcattccttcctgtcgggcgatatctacttcattgacttcctgccttccgagctgcactggctggacgtgctgatcgtgctggcgaccgccatcgtgctgagcctgttggccagttggtatccggcgaggcgcgccagccgcatcgatccggcgcgggtgctgagcggacaataacaccgacggggaggcagcgatgccgccccgtttttttagcctggggatgggttatgtactacggtttcgatatgggcggcaccaagattgagctgggggtgttcgacggcaacctgcagcgcatttggcaaaagcgggtgccgacgccgcgtgaagactaccggcaactgctggccacactgtgcgatctgacccttgaggcggatgcgttttgcggccggcgcggcagcgtcggcatcggcataccgggcctgcccaacgacgatgacggcacgttgtttaccgccaacgtgccggcggcgatggggcggccgctgccgcgcgatctggcggcgctgatcgggcgcgaggtgcgcgtcgataacgacgccaactgctttgcgctgtcggaagcctgggacgacgagttccgccgctacccgacggtgctgggcatcatcctcggcaccggcgtgggcggcggcctgatcgtcgatggcaagacggtgcctgggcgcaactatatcgccggcgagttcggccatttgcgcctgccggtggacgcgctcgaggtgctggggcgtgatgtgcctcgcgttgcctgcgggtgcggccatcagggttgcattgaaaattacatatcgggccgcggtttcgaatggatgtacgcccatttctatggccggcgcttgcctgccaccgagatcattgcgcattatcaggcgggcgagccgcaggcggtggctcacgtcgaccgctttatggacgtgctggcgatctgcctgggtaacctgctgacggtgctggatccgcatctggtggtgatcggcggcgggctgtcgaatttcgacgccatttaccaggcgttgccgcagcggctgccggcgcacttgctgcgggtggctcggctgccgcgcatcgagaaggcgcgctatggcgacgccggcggcgtgcgcggcgcagcgttcctcaatttggtaaacagggaaaagtaaggagagagttaatgcacactcgccatcggctgtgtcagtttcgcaagagtaagcatgtgctgcatcagcgctttcgttcacgcatttttcaccgtgacaccatggcggcggccgagctgaaaaagccgtttgtggtggtgttgaccggggccggcatttcggccgagtcgggcattcgcaccttccgcgccgcggatgggctgtgggaagagcaccgggtggaggacgtcgccacgccggaaggttttcagcgcgatccggcgctggtgcaggcgttttacaacgaacgccgccgccagctgcagacggaggagatcgccccgaacgccgcgcaccgcgcgttggcggatttggaagagtggttgggggacaacttcctgctggtcacgcaaaacattgataacctgcatgagcgcgccggcagcaagcgggtgctgcacatgcacggcgaactgctgaaggtgcgttgcacccagtcggggcaggtgttcgaatggcccggcgatctcagcgttgacgatcgttgccattgctgccagttcccggcgccgctgcggccgcacgtggtgtggttcggtgagatgccgctgggtatggacgacatctaccaggcgctgagcaaggccgatttcttcgtcgccatcggcacctccggccatgtctatccggcggccggcttcgtgcatgaggcgcggctgggcggcgcttacgcgatggagctgaacctggaaccgagccaggtagagagccagttcgacgagaaacactacggtctggccagcgaagtggtgccgcgttttgtgcacaagttcctggtgggcaaggtggcgcgggccgaccgcccctgagaaaggcatcagggcgcaatgcgcgccctgatgggatggtgggcgtattagcgcccggctttcagcttttggaagtagctttcgtacagcgtgctggcgtcgccgacgtcgttttgccactcgccgtgctcaatcaccgccttatccgggtagagagacttgtcgttggcaatctccggcgacagcagcttcttcgccgccaggttcggcgtcgggtaaccgatggtctccgccacctgcaccgcgatttccggccgcagcaggaagtcgatcagtttcagcgccccttcgacgttgcgcgcgttggccggaatggccaggctgtccatccagaagatcccgccttccttcggccagacgatctccagcggcgtgccggcctggcgcgccacaaaggccgaaccgttccacaccatgccgacgttgacttccccttccataaacgggttgcccgggttgtcggagttgaaggccagcacgttcggcatcaatttctgcagttcgtggtaggcggcttcgatctctttcgggtcagtggtgttgccggaatagcccagcttgagcagcgccatctggaacacttcacgcgcgtcgtcggtcagcagcaggcggcctttgtactgcggttgccacagatcggcccaggaggtgacggtggacggatcctgcgcgtcgctgttgacgccgatggcggtggcaccccagatgtaaggaatggagtagtcgttgttgggatcgaacggcttgttcagcagggtgggatcgagatccttgaagtggctgagcttgctcttgtcgattttttgcagcatgccttccttgctcatcttggcgatgaagtaggtggagggcaccactagatcgtacgcgccgtctttgtaggtcttcagcttggcgtacatgctttcgttggattcataggtggaatagatcaccttgatgccggtttctttggtgaactgctccagcagccccggcgggacgtattcagtccagttatagaaatacagcgttttgccgtcagaggcgtttgcagagcagaaactcagcgccatcatcccggctgcgagcagatgtgaccactttttcatgcagcgtatccttcagcagtagtgagccgaacccgtatgggccgccgttttcggccgcgccataccccagaaaggggccattataggggccggggcggggtgggtaaaggcggttatcccactggcaaatcaaggggttcagcgccttaaagcgcatcacaatttgtgtgtctcgcgctggacaggcggtgaagcgcgtgcgaaacaataattttggcgaataaacgagggcagcgatgaatttcaaacaggtcttcagccagactgagctcagcaagacggatctgacgattttgcactgcattctcgacaacccggacgcctgcatcgacgacggcatccgtgcggtgtccgcacgctgctacagttccccctcgacgctggtgcggctggctaaaaagctgggctttcgcggctatctcgaactggtctatttcatcaagttcaacctgacgatggcgccggcctaccaggcggaacgcgctacgtcggcggcaccgccggcccagcaggcgcagtttctcgatctgctcgacaacggcaagatcctgatccacggtagcggtttttcgcagctggtggctcaatatatgtacaacaagtttatgacgctgggtgtagacagttatctgtcgctgtggccggatttcgacattcttgaccgtgagacgcgctttcgcttcgacatggtgatcgtgatttcaaagtcgggcaacagcggctcggcgctgagctggggcgaagcggtgaaacgtaaccgcattctgctggcggccttctgcggcgacggcgacagcccgctggcgcagcaggccgacatgacctttctgtttgaggaccggcaaaaatacgatcacgatatctactatcccaacccgtttttcggccactgtctgttgggattcgagaatgtgatcaccgcctggtttgaacgacgcggccgctgacggccgcgtcgtttagcgccagtgcccggcatacgcgcggtgggcctgcaggtactcctccaccagcgttttcgccagcgagtaggagttgaccagcgggtgcaccatcagtgctttgatggccagttggcggttgccggtcaggatcgccgccaccgccagccgttcgtactctttcacctgcgaaatcaggtttttctgggtgtcgggaatatcgcgcattttgaccggctgaatgccggcgctgctcaattcgcagctgatttcgatcacgtcatccgggtgcagaaaatcgagcgtgtcgcggttttgcatcgacaccaccacgcgtttttgccggccgctgttgaccgcctccagaatgtcgatcgccaccccggcatagccgccgctgtccggctgctcgataaactgttgcagcgtcagcatctcgcgcgttttcaccttgccctggttggactcgcgctgcatgtaggagttttcgcgctgcagataatggctgaaatagacagagaaggcgtgttccaactggtgggggatgtccagcacgcctaactctgacagcatttggcggttgatcgccgcgatttgttcgccgcgggtctcgccgcccgcgacgatggcggcgatcgcctgctcacgatagtagtaataatagagatactcgttgagcatcaaattgtccgacagcgccaccaactccggcgagaagtatttcatgcaggtatcacgatacaggcgcggatccgccagcaaccgctccgtgaccggttcgccgttgacgcgcgcattgcggaaccaggaaagatggttgaggccgaagcagtcgacgctcagttggtcttcgcggcagcccagcagctcggccagttcgcggataaactcgctgggggcgtcgcagatgccgtagacccggcgctggaagccggatttgatgatcgcctcggtcaccatgccggaaggattggtgaagttgaacaggaccgcgtccggtgaggaaacctgttcgatcaggcggcaatagtcgaggatcgccggaatcgaacgcatcgccatggcgaagccgccggcgccggtggtttcttgcccgagcaactggtgattgagtgcgatgcgctcgtcatggatgcggccttcctcgccgccgatgcgcagggtggtgatgatgtagtcggcgccttgcagcgcctgacgcggatcgctgctgaggctgaaagcaatgtcgccgcgaatgcgctggaatacgccctgcgcgagggcgccgtagatcgccagatggcgctcatcggtatccataaacaccacttcggtaatgccgatgcgatgggcgttataggcgatggatttggcgaggaacggggaacgcacgccgccgccgccgagaacggttaacttcattcgatatctcccattaataaagcgttagagtgtcgctaaatatttttctacctgatttttgaccttgccgaccgtgacgccgtaaattacctgcacttcacggcgattcttcactacgcctttggcgccggtgctttttaacgcggcttcatccacccgcgtcatatcctttaattccacccgcagtcgggtaaaacagttatcgacggaaataatgttttccttgccgcccagcgcgcgaataatgatgccgctcggctcgtccggggtatttttgcggttccggtaatcctgtttggaataaagtctgacgtcctgatcatcttcacgacccggcgtcttcagattgagcttcagcaccagcgttttgaacaccaggtaatacaccgcaaactgcaccaggccgatgaccacgtacagtggccagcgggtgagggaaaccggcagcggcaggttataggccaggaactcgaccagcccgctggcgccccaggggcgcacctggaacaggttgcagaccacctgcgacagcgcggtcaacacggcgtggatcacccacagcagcggagagataaacaggaaggtgaactctatcggctcggtgatgccgaccaggatcgaggtggtgatggccgggattagaatcgccttggccagcattttcttttccggcttggcggtgtgatagaaagccaatgccgcgcccgacaggccgaagatggtcaccatcccttgctgcgagaagcgcagcgcttcgttcatcagcggcgagatgctcgggtcgcgcatataggccaggaaaatcgcctgcgagccggagacggtctggccgtcctgcacgatcgaaccgccgatgctggtaagctggaacggcgaccagataaagtggtgcagcccggtggggatcaggaatttctcaaagaagccgtagacgaataccccgagcgagccggcgcttttcataaagccggtcagcgcgatcaggccctgtgagatcgccggccacaggtagctgaaggcgacggcgtacagcatgatgatcggcgtcatggcaatcagcaccagcttggcgccgccgtagaccgagaacacgccgttgagttcgacgttgcacaggcggttatgcacccaggcgatggtgacgccgaggataagaccgaggaaaatgcccatatccaccacggtaaaacccagcaactccgtctgcccggtgccgtaatattcgccgttgatcttggccgcgacatggccgctgaattgcagataagaggcgttggcgccgaggaacatgataaagcacatcacggcgaccagcgccgcttcgcttttcttgtctttggccagaccgtaggtaatgccgatgcagaaaatcagcccgaggttgccgaataatggccagaaggtatcgccgatcattttaccgatagagaagacggcggaatgttcattgattaatgtggcattggtgagaatagaactgagcgccaggatcagaccgattaccggcaggaaaaatatcggccccatcatggctttggagaaaagctgcagcttgcttaagatattatcgataatacctttcatggcagttcctttttatattttaatggatgacgacgttgctgaataaactccctggaagcgagaaaaaaataaggcaccttgcctgagttcagttatagggggaagttttcgccgctgcaatcggcggggcggaaataggcaccgatggtcagggagtgacaaccggtgccggttgtgaaggggatcacaaccgggcgccgcagcgcccggcgggatgggttactcggccttgggcgagcgatcgcgcatcacccactggctggcgatcaccagcaccagcgacagcagcagcaaaatggtggccagcgcgttgacctccggtgagacgccgactttcaccatcgagtagatcttcagcggcaagatctcgtagctcggcccggtgacgaaggaggagaccaccacgtcgtccatcgacagggtgaagctcagcaaccagccggccgctaccgccggcaatgccaacggcaggatgatcttgcgcagaatggtgaactcgcttgcgccgagatcgcgcgcggcttccagcatcttcacgtcgaagcctttcaggcgcgcgtagacggtcaccaccacgaacggcaggcagaaggtgatgtgcgagaacagcaacgaccagaagccgagcgaaatgcccagcagcatgaacagcaacagcagcgagatggccatcacgatgtccggcgacatcatcaccacgaacagcatgccgccgacaaacggtttgccgcggaagcggtagcggtacagcgccaccgcggtcagcgagccgatcagcgtggcgaaggtggcggagagcaccgccatggtcagcgagtggcccgcggcctgcagcaggctgtcgttattcagcagggtgctgtaccacttggtggtaaacccttgccaattgatgccgaagcgcgaggcgttgaaggagttgacgatcaggatgacgatcgggatatacagataggcgtataccagcgtcataaagccgccgcgcagcagacgtccgatcatgccagatcctccttcttgttcagcaggcgtgcggcccggtaataaaccagcagcaacagccccatcaccagcgtcaggcagatgctggtggccgcgccgaacggccagtcgcggatattgaggaactggcttttaatcacgttgccgatcagcaggtttttggcgccgcccatcagatcggcgacgaagaacagccccatcgccggcagcaccaccagcaggcagccggcgataatgcccggcatggtcagcggcacgatgatgcggataaaggtttgcagcttgctggcaccgagatcgcgcgccgcctccaggcaggacttatcgagcttttcgatgctggagtagagcggcatcaccataaacggcaacaggatatacaccaggccgaggacgaccgcttccgaggtgtacatgatgcgcagcggcttgtcgatgacgccgatccacagcagcacgtcgttgagatagccgcgggtgctgagaaacagcttcaggccgtagatgcggatcagcgagttggtccagaagggcacgatcagcagaaacagcagcagcggccgcaccttctgcggcaaccgcgccaggataaaggcgaacggatagccgatcgccaggcagcacagggtggcgatcagcgccatgttcagcgagtgcagcagcacctgggcgtacaacggatcgaacaagcgccggtagttgtccagcgtgaacaccatctgcaccaggttggcgtcgtcgcgggtcaggaagctggcgccgatgatcatcaggttcggcatgaacacgaacagcaacagccaggcgacgacgccgacgatcaccacattctggaagactttacgcgatttcttcatcggccagcaccacctcccagctttcaacccaggttaccgccatcttctgattgagcgagtgatcgacgtccggatcgtcttcgttgaagaactcgctgaccatcaccattttgccgctctccagctcgaccaccgattccagcgtcatgcctttgtagttgcgctcgcgcacgtagccgatcagcccgtcgtgctgcgcgctgtcgttcacttcttccacccgcagatcctccgggcgcagcagcaccttcagcttttggcccggttccaccggcagatcggcgtagatgtcgcactcgcggccctcgacgttggcgcgcacccgctgcggatcgaggcgttgcaggaccaccgcgtcgaaaatgttgatctcgccgatgaagctggcgacgaacaggttcttcggctcttcgtagatctcacgcggcgtgccgtcctgctcaatgcggccttcgcgcatcaccacgatgcgatccgacatggtgagcgcttcttcctgatcgtgggtgacgaacacgaaggtgatgcccagtttgcgctgcagcgctttcagttcgttctgcatctgcttgcgcagcttgtagtccagcgccgacagcgattcgtccagcagcagcaccttcggcttgttgaccaccgcgcgggcgatggccacgcgctgctgttggccgccggagagctggcccggccgccgcttggcaaagtcgtccagctgcaccatgcgcagcgcctcttcgacgcgcggcgtcagttccgccgccggcaccttttgcatgcgcaggccgaaggcgacgttgtcgaacaccgacatgtgcggaaacagagcgtagctttgaaacacggtgttgacgtggcgatgttcggccggaatggcggtgatgtcctggccgtcgagcacgatgcggcccacatcggcgtcttccagaccggcgatcaggcgcagcaccgtggttttgccacagccggaggggccgagaatggtgaggaattcgccgtggttaatcgtcagatccagatcggcaatgatggttttgccatcgaacgctttgctcagggcatgcagttcaacaaggggagtcggagaggatgtctcagtcatttatcgtattactctatcccgtgggctaatgcagatagaaccgcaactggaaaagactgccggagcttgcgggatacccgctgatcaaatgaagctcaaaccagttacgccaatggaaatttttcgagcgcgcatgatagacgctgaatgccggaattgaaagccgatccggcccagatgccgcgtttttcatcatgatagcgacaaatgaccctgtgatgacagcattattcccctcagaaatcatcacaaagattaatgatattggcgaattctggttaaaaatgacctgacgcaatatttgatcctgatcggttccgcataatgaaacgcgatattctgaggggccgctaccatggacaaattacttgaccgctttttcaactacgtctctttcgacacccagtccaaagcgaacgtaaagcatgtgccgagcaccgacgggcagttgaagctggcgcgtgcattgcagcaggaaatgatcgcgctcggcttcgagcgggtgtcgctcagcgaacacggctgcgtgatgggcacctggccgggtaacgtcgcctggccggtgccggcggtcggtttcatcgcccatctggatacttcgccggatttcagcggtaaacacgtcaatccgcagatcgtcgagaactatcgcggcggcgacattgcgctcggcatcggtgatgaagtgctgtcgccggtgatgttcccgatcctgcaccagatgctggggcagacgctgatcaccaccgacggcaaaacgctgctgggcgccgacgacaaggcgggcatcgccgagatcctcaccgccatggtgcgcctgcgcgcgcgcaagatcccgcacggcgacatccgcgtggccttcactccggacgaggaggtgggcaagggggcgcagctgttcgacgtggcggccttcaatgcggaatgggcctacacggtggacggcggcggcgtcggcgagctggagtgcgaaaacttcaacgccgcctcggtgacgatcaaaatcctcggcaacagcgtacaccccggcagcgccaagggagtgatggtcaacgcgctgtcgctggcgacccgcattcatctggcgctgccggcggacgaagcgccggagaccaccgaaggctaccagggcttttatcatctcagcagcatcaagggcagcgtggagcgcgccgaaatgcactacattctgcgcgacttcgagcgcgaagggttcgaggcgcgcaagcgtaagatggtggacatcgctcgcgagatcggcaaaggcctgccgcgcgattgctatatcgaagtcagcatcgaagacagctattacaacatgcgcgaacaggtggcggagcacccgcacgtgatcgcgctggcgcagcaggcgatgcgcgattgcgacatcgaaccggtgatgaagccgatccgcggcggcaccgacggcgcgcagctgtcgttccgcggcctgccgtgcccgaacctgttcaccggcggctacaactaccacggcaagcacgagttcgtgacgctggaaggcatggagcaagcggtggcggtgatcatgcgcatcgcggcgctggccgccgagcgggcgcggtaaacactttcgttccccggccggctagtgccggcccgactatgcttttctgatccgcccggcggggcccagcgcgcccgccgttatcttcttcttctgttctctttatggttcccagtctcatggttgtttcgttcaccacacaacccgcggtgagggaatcccattatccttcgagataaaatgctgtttatgcatacagtgtggctgtgtgcttaaccggttttacagcttcggtgcggtgagcccagtcgccaggggatgctgggggaatgagcgttgttaaccgccatcaaacaggacgtaagagggtaacaatcatggcagaagaaaagaaaaatgctcaggtgattaacggcgttaacgacgatattaccgaactgaaatcgctgtctacgctgcgccagcgcgtggtcagcgacggtgaaatcgtctccaaatcggccaatggttttcggctggcaaatggcaataccggcgtgatgctgcgtaatgatggccgcgatttttacgcgctggcgacgccgggcggccaagcgcttaacgggcagtggaacaccttgcgcccgttctcattcaatttggcgtctggccgggttgcgatgcgcaatggagtggatatttccggcggtgcggtggtgtcgcacaacgcgggtatctacacctcgaccaccggcccgactccgcttatcaatggtcaggtttatgatgcggctgccatgcatactaattttaccagcggcaacgtcactacggtgatgttaatgggctcgcggattgtcgctggtaaagaaaattatggattgctctcttatcgagactggcagggtaactggaacgaactgcaggtaaggcccaacgccgagctttctgtagggcaattgactaaacgcaaccccgatggatggatttgggctgctgggaaccgtagtgttgacaatgataagggacgtattaccaatggattgcatttgcaggggcgatacgacctgtatgccaacctttatcatcatgaatttgtcggctctcaccattcgctggtgctgaatgtcgccaacggtggtgggcaaggctggtacgaattccgtaatgatggtaacgcctacaccaacggcgcctggcacagcagctccgatgcccgcatgaaaacggacatcacccaaattgccggtgcattggacaagctggccaatattggcggctacacctacctcaaacagggcgtgccggaggccggggtgatcgctcaggaagtggagagcgtattgccgcagtcggtcacccaaaccgaattgaaacttaatgacggcagcgtgctgaaagatgcgcggggcatcaatatcaacggcgtggtggcgttgctggttgaagcgcttaaggaagagcgagcggcccgagaaacgctggaatcgcggttggcagcgttggaaaaagcgattacgtgcgcctgagtaataacaatttttgtgggtagcgcagagtattaaccgatagtgctgctggcgataagcacttaagaatttactctgctgccacatcaacgaaataaaaggactggcatatgagtggcggagatggaaaagacagccgtggcccaactggtggaattaaagggggggcttcagaccagggacccaatgtagggcacggtggatctatggatataaatattcctggcatgggggatgtgcatatcgatggagtacatggtttaaatcccggtaaagataacagtaccaactgggatgatggtaaagggaacggtaatggcggcagggacagtagcagcagtggagattcccagggggcagcgatacggcggcaggttaacgctatcaaaaatgaccctaaagttaataatatactgaaagatttacaaaaaaaggtacgtgcggttacaacttatgcaaaggtagctttgaaaagtgttgaggctgacggaaaaatacaggtgcaggttggtgaaattcgtacaaccgatgaggccgccgtcagcaaggctattacctctgtctcacaagttaaaaatgtacttggcgtggggttgcctgctcaaggcgggatcgtgttcgccggtaatatcgatacccatcatagaatcggtaattatcagaacatacccaacggcaacaataacggcaacaattctgccgcagaggataaggcgtcattagccacctattccgaggtgcttaatggaaaaatcccaccgggtttctggcttgataataatagggtgatgactgaaattacggagcaatatgaaatcaacggcggcggcaaagggagcgatcgcacaggttaccggcaacgtaatgtcgaagtgccttctttgacatcggcctatcaacaatttaagcaggtagaacgagaagtggccgaagaggcccgtaaagctgaagaggcccgtaaagctgaagaggcccgaaaggcggaagaggctcgcagagccgaagaagctcgtaaagctgaggaggctcgcaaagccgaggaagcccgaaaggcggaagaggcacgcaaggtagaagcagccagaaaaacgttattcgccaaagcggggattttggatgctccggcgtatacgccggaaaagctaaaagcggccaatgcggcgctggcggcagcaggtgccatggtgctcaaccgtgcgcccgcgatgctgcagacgtcggtaatcgggaaaggcgtgatgacgaccacgagcgaactggccggctgggcagcgagcgcgtcgtggcgggcagcctacgaaattggcagtatacgcgccggcaatgtggtcgctgccggatcggtgctgggggcttttgcccttggtttctacccgtcggaggtcggtgcagggagcgaccgggtacccgggcgggatgtcaatttgtttgccctccaggcgagcctggcggcagcgggccgggcgaccatccagcccggcatgacctcggtcgatttgccggtgcgcgggtttatcaccaccgacgacgacgggagacagagcgtcaacttcgtcaggacaggcgtcggcggcgtatcgccgagtgtgccggtattcagacccgttcgcgatgagctgacaggactggacaaaatcacgctgcccgcaatggcgggggtaccggcgaggacgatactgatcaacccggtgccgaccgggccggccgcgccggcgcataccggcaacggctcaccgggacctaaatcgccagtgcataccggcaccggcatcaggcaggcggacagcatcgtggtcaccaccttcccggcggatgtggtgcaggatctgcaagactttatcctgtggcagccggatgcgacggagtttggtgtagaggccatctatgtgatggtgagcaagccctatggtgaaaccaacgccaggggcaaatacagcggtcgtgaatacaacaccaataaagctgggggccccattcagaatctggattggaaaggggccagcatcgaccgtgccggcgtggataaggtgaagctgcatactgggcgttttgaacagaccccggaaaaccaagtgatgattgaccgtttggataaaattttgaagggggatctacaacctactgacactgataggcgattttatactcatgaaatcagagagttggaaaggtacaggaatcttggtataaaagatggtgaggttccgcacagtgttcaagaacagaaggccgtatggaataatactcatactgctacgcttgaagactatagaataaatgaaaaggaacaggcgctttatacagatggggccctacaagccgcatatgaacaggaactgaaagatgctatgggagggaagaaataatgcctttaaaagatatcgttaaaaatgaaagtgtagaagatgtgctaacttttttggggccgacctctgattaccgtaaattggatcggctatatacctataatcgctttgatgcaatttccagcggggagctctcttctacttacgatgcattattccaaaaaggggtgcttcaagatcaaaatggaaaagtagtgaaaggccccaattggaaagagccgaaatttgtaaccgagaaaaaatacggtatcgaatagctatagttatgctctgattagtgcatttttaacccccagcaaacgaaattttgttgggggttttcttttggtgatgtaccgggcagaacgaaactaataaacctagtaccgatcgggtcggcaccggtattaggcagccggacagcatcgtggtcaccaccttcccggcggatgtggtgcaggatctgcaagattttatcctgtggcagccggatgcgacggagattggtgtagaggccacctatgtgatggtgcgcagtccgagatatactccgggtaaagtgagcggcaaaggacagcaagtgggagacggctggttgaatacagcggggcagttcccagccagattgcggataaactgcatgggcgagagtttgcgagctttgacgcgtttcgtaaggcgttttggactgaggtggggaaagatcctgagctgagcaaacaattcaagtcggggaacttcggcgatatccaaacaggtaaagcacctgcgcctagagaaacggagcaggtgggggacgtgttaaatatgaattgcaccacgtaaaaccgatcaaagataacggtgaggcttatgatgttgataatatcagcataactactccaaagcgccacattgaaattcatagagggagttaatgagatggaaaagaaaacaatatctgattatacggaagcggagtttttaaacttcgtgaaaaaaatttttgatgtgcaaaatacgacggaagaggaggatataaggaatattctcgagtttaaacggctgtgtgagcatccttcaggatccgatcttatctattacccagatgaaaacagggaggatagccctgaaggtgtcgtaaaagaagtcaaagagtggcgtttcaagaacgggaaaccaggcttcaaacaagggtaaccgtgtctaatcgtcttatgatgatcaaacggtaatgagcacttcagaagcgcccagcaaactagcgtttgttgggctttttttggtatttcaatcaactaacctagctatcagaaggtgttacgaaactcgagttaaactccatgacaacaagtggggacggctggttgaataaacctggctggctcctagccaaatcgccagtgcataccggtaccagcatcaggcaggcggacagcatcgtggtcaccaccttcccggcggatgtggtgcaggatctgcaagactttatcctgtggcagccggatgcgctggaaaccggggttgaagctgtctatgtgatggtcagtgatccgctggactcggggcgttttacgcgtcagcaactggataaaaagtacaagcacgcgagtgattttggtgttgcggacaccagaaagaacagagagactctgactcaatatcgcgatgcgctcgaggcccatttgaaggataaggatacggtagagaaagggacttatagacgagaaaaaggatctaaggtgtttttcaatcctaacacaatgaacgttgttgttttaaaagaaaacggcgatttcttatcagggtggaagataaatccagacgcagataacggtaggatatatttagatacgggggatttatgaatcggatggcaattattgatctggctaagagttttctaagtaaagaggtcggggcattggagttctccgaaaaaatatgtgtagaaagacgtatgctctatggagttaaggatcaggatagagacgttatgaattgtggggaagagctatttatgatagctgaagtttacaatcctgattcagaacgtgctgattatgaacttgatgatgccggattgcgtgccgcagttataacggcactggaaaaattcaattttatctgaacacattattagaatgggtgctctcgtagatttgaacttatctgagtattagggacggtagaaagaaccgcctacatagtgacagaatagttaacaaaagtgacccttacgcccaatagacgagagtctattgggcattttctttttttcacggtgataaggaggtgaagagctaatttaatgccggttgctcggttgcccagcaaggtccagcatcaggctggcggacagtatcgtggtcaccaccttcccggcggatgtggtgcaggatctgcaagactttatcctgtggcagccggatgcgacggagtttggtgtagaggccatctatgtgatggtgaacaagccctatggtgaaaccaacgccaggggcaaatacagcggtcgtgaatacaacaccaataaagctgggggccccattcagaatctggattggaaaggggccagcatcgaccgtgccggcgtggataaggtgaagctgcatactgggcgttttacagagtcagacgctaacaaagtgatgatcggccgcctggaaaaaatcttgaagggagaactgcctcccaccgatactgacaggcgattttatacacatgagatcagggaattggagcgttatcgcaatttgggtattagagatggatcggtgccagataatcaaggggaagtgtggaataatacgcatactgcgacgttggaagattatcaattaggcaacagcgaggctttgctctatacgcaggaggctttagacgctgctgaacaacaagagttgaggatgctaaaatgattgatttagaacgcttggcaaaagaagaaaaaatttctgacgtcattgcctttttggtgagaaatgaggatgggtttggttatccccaaatggatcgattctttagtcgccataattttacagtaattgggaatggtgaattcagacgggtgttcgaacagttacgtcagaatggcgttattgaatggggtgacaaaatgcttgttaaaaaaggccccaactggaaagagccgaaatttgtaaccgagaaaaaatacggtatcgaatagccatagttatggtctgattagtgcatctttaacccccagcaaacgaaattttgttgggggttttcttttttggctggtgggggcgccataacctgagccttgtgccgggtggctaaagtagcggcgcccgctcttttcgtcgcttgggctaacgtgcggataccatagttaaaacgggacgcttgcgattatcataatcgcttgccgcaacaaggcgttgctcatagtgttgaagcctattccccacgcataaggaccgcatgatgagcaccgaatatcgcatcgccagcccgcatttggcgcagttcgttcaggcgatttggcgccaggccggcagcacggcgcgcgaagccgagctggtggccgatcacctggtgcaggccaatctggccgggcacgactcgcacggcgtcggcatgatccccagctacatggcgtcgttggcgcaggggcaattgcagctcaatcagcatgccgaggtggtgcgcgacgccggcgcggtgctgacgctcgacggcgcgcgcggcttcggccaggtggtggccagcgaagcgatggcgctgggcattgaacgcgccggcaagctgggcctggcggcggtggcgctgcacaacgcgcaccatatcggccgcatcggccattgggcggagcagtgcgcccgcgccggttttatctcgattcacttcgtcaacgtggtgggcgatccgatggtggcgccgttcggcggcagcgatcgccgcttcggcaccaacccgttctgcgccattttcccgcggccgggccgcacgccgctgctgttggatttcgccaccagcggcatcgccttcggcaagactcgggtggcctataacaaaggcttgtcggtggcggcgggctatctgatcgacgaacacgggcaacccaccaccgaaccgaaggtgatgcatgaagcgccgttcgggtcattgttgccgttcggtttgcacaaaggctatgcgctggcggcgatgtgcgagatcctcggcggcgcgctctccggcggccgcaccacccacgacgccacgctgaaagccgacagcgacgccatcttcaactgcatgacgaccctgatcctcgatcctcaggccttcgacgccccgcaaatgcaggccgaggccgaagcgttcatcggctgggtgaaggcgtcgccgccgagcggcgaacagccgatcgcggtgccgggagaatgggaagaggccaaccgcgcggcgcggctggagcagggcataccgatagacgccaatacctggcggcagatttgcgcggcggcggagcaggcgggcatggcgaatgaagcgctggccggttttcgcgcgcaggcgcggcaagcataaaaaaagccacccgatagggtggcttgttcgcgtactcgtaatcagtcgttaaagtaccaatagccgctgttgaccagcgcggtcagcagcgccaggaacgacggatcgtccaccgcgtcgccgagcagggcggcatcgacgctgaagtgctggcacagggcgtctgcggcctgcaactggtcggtgtcgatcagttcaccgttgacgaagcagcgatcgccgatgcgcagcacgcgcaatccgcccaggcgctgcagcgcttcaccctgttgcagcagttcgtagatttccccggcctgatacggcggctccggcggcgccagatccagctcgtggcgcgattgggagataaactcgccgaaccagtgctggaagtgttccggctgttgcaccagatccagcatcatctgccgtaaggcgtccacttcctgcggcaggatctccgccgggtgttcgcgcagtttaacgtccggatcgccgtagcgcttgctgccgagctcgcgcgccagcacgtagtcggcgaagccgctcaccagctcgcggccgttcggcgcgcggaagcccaccgagtagttgagcgcgttttccagcgcgtagccttcatgcgggaagcccggcggaatatagagaatgtcgcccggctccatctcttcgtcgatgatggcgtcgaacggttcgacctgcagcagatccgggtgcgggcagtgctgtttcagcggcgttttttccccgacgcgccagcggcggcggccagtgccctgaatgatgaacacgtcgtactgatcgaggtgcgggccgacgccgccgcccggcaccgagaaggagatcatcaggtcatccatccgccagtccggcagttggcggaacgggcgcatcagcgcggcggaaggctcatgccagtggtccactgcctgcaccagcagcgaccagttgttttcgctcaggtggtcgaagctctcgaaggggccgtgcgcaacctgccaacggccgtcctggtggctgaccaggcggctgtccacttcgttttccatcgccagcccggccagctcatccggggagatcggatcgataaagtttttgaagccgcgcttcagaatcaccggacgcttttgccaataacgttgcaaaaaatcgttccagtccagatctaattgataatccatgttctattccaggataggggagtgagcctgagtgcgattataacggaagtttggccccgtggatcggggccgcagcggcataatttactcgttgtggtgggtgtcgtgctggcgggcgaaggtgacctgcatgcgcgcgccgccgagcgggctgtcgctgatgacgatttcgccgtcgtattgctcgatgatctccgccgccaccgacaggccaaggccctggccggggcgcagggtatccacccgctggccgcgctggaaaatcagctggcgcttgctttccgggatgcccgggccgtcgtcgtcgataacgatggtgaggtttttctcggagtgcagcgaggtgatctccacgaactccaggcagtatttgcaggcgttttccaacacgttgcccatcacttccataaaatcgttcttctcgcccataaaggtcacttccggcgagatgtccagcgtgatcaccacccctttgcgctggtaaaccttgttcagcgccaccaccaggctgtcgagcagcgccggcaccgagtggatctcgcgcgtcaacaccgtctggccggagttgatgctggcccggtgcaggtagtaaccgatctgctgcgagatgcgcccgatctgatccagcatgatcggctcggcttcttcgatggtggtttgcttgccgctgcgcagcgagcgtagggtgctttgcagcaccgccagcggcgttttcaggctgtgggtcagatccgacagggtggtgcgatatttggtgtagcgctggcgctcgttgcgcaccagaatgttcagattgcgcaccagcccgcgcagctcgctgggtggattttcgtcgagctgatcgcgctcgccgttctccagctcgcccacctgattgaccagcgccttgatcggccgcaggctccagtaggccgccagccacagcagcggcaccaccagcagcaggttggccaacagcacgtagctgaaccactcccacaccacgtcggagcgctgcagctcctgcggaatgctgtcgaccaccacgatggtcagcgccggcaggcgaggcgtggcggcataggtgttgaccgccaccgagtgggtcagcgcgttctgatcggtatcgtcgtaattcttcagctgatcctgcgctttggggttgtcccccagcacttcgctactgacgcgggtgtcggtgtcgatttcgtagaagccggactcctccagccattccttgttgatcagcttctcgagctccggcaccttgcgctggctccacagcaggttgcctttatcgtcgtagataaataccagcgtcgggaagttgagatcgagatcggggggaatggcgatggtgagcttgttgtctttccactgcgccaggctgaagaacaggttgctctcgccgcgcagcaaacggaaggcggttttgtcgaagctgacgatatagccgacgaccgccaccaaaccgtaagagagcgacagcgccaggatcaccccggcggtcgccatcaggaagcgggcacgcagcgaaaacggttttttattcttgttgaacatcatgttcacttcgcgtcaaaacgatagccctggccacgtaccgtggtgatcacttcatgcgggtattccgcctgcactttcttgcgcaagcggcccatcagcacgtcgatggtgtggctttcacgcagttcggcgtccgggtagagctgcagcatcaacgaatccttgctcaccaccttgccggcgttgcggatcagggtctcgatgatggtgtattcaaaggcggtcagcttgatctgttgatcgttgacgctcagttcgcggcgcgacagatcgatctggaacggcggcagcacgatcacttgcgaagccaggccgctgttgcggcgcatcagcgcctgcatgcgggcgatcacttcttccaggtggaacggcttggtgacatagtcgtcggcgccggcttccagcaccgccactttgtcctgccagctttcgcgggcggtcagcaccaggatcggcagcttggtctgatgggcgcgccagcggcggatcaggctcaggccgtcttcacccggcaggccgagatcgacgatggcgatatccggcgcgtgttcctgcaggaaataatcggcttccttggcgtcttcggccgcgtcgacctgatggcccatctcgcgcatctgaacggaaaggtggtgacgcagcaaaccattatcttcaacaaccagtactcgcatggcgaactcctgtgactatgcgggtgaacgtcctgtcacccacgcgataaaagggaacacgctctgcggcgtgtcagggaataacgcggccacctgaaccattttgacaaaaagtgctgaggctatggtaggtataacccgcccggctcgcaagagagccgaagcaatgtattaaaataagcgttatcaatttgttcgccgacattatcgacaagctctgataaacgtcggataaacagcggcggggcaacattaaacgcaacttaaacgccccaggcattgcccgcgaaagggaagtgtgagccggggcgcttgataagctttaaaggtactaataaggtattattgaggcaacggtacattttctcaggagcgacggatgaagcaattaacccaggcagaacgcatagcgggcgcactttacggacagatgctgggcgacgcgctcggcatgccttccgagctgtggccgcgcgagcgggttaagcgccatttcggctggatagacggctttctcgatgggccggcggagaacaccgccgcctgttacttcaaggccgggcaatataccgacgataccgcgatggcgttagcgctggccgatgcgctgcgggaagcggaaggcgaggtggtgccggaactgatcgcccgcaacgtgatccgctgggtggacagttttgacgccttcaacaagaacattctcggccccagttccaaactggcgttgagcgagcagaaggcgggcacgccgatcgccgagttggaaaacaacggcatcaccaatggcgcggcgatgcgcatttcgcctttgggctgcgtgctgccgtccgcgccgctggaggatttctgccagcaggtgtggctggcctccagcccgacgcacaaatccgacatcgccgtcgccggtgcggtggcgatcgcctgggccgtcgcgcgagcggtggagggcgcggactgggtctcgattcgtctggcgctgccgggcgtggcggagtatgcccagcgccggcaggagacgacgttcagcccctcgctggcggcgcgcatcgagttggcgtttcaggtggtggatgaggccgccgatcccgagcaggcctctgagcggatatatcaactgatcggcgccggggtgagcaccatcgagtcggtgccggcggcgctggcgatggtgcagctggcgcaaaccgatcctacccgttgcgcggtgctgtgcgccaacctgggcggcgatactgacaccatcggcgcgatggccaccgctgtctgcggtgcgctgcacggtgcagaagcgatcgaacccggattgctggcggagttaaaacgggtgaatccgctggacgttgaggcgtatgcccaggcgttcgtgcgttttcgccgccgccggcagggcgaggtgtgagccgccgcaaggtgcaacgggtcagctttcgctggtaaactcatacatgtcgctgcggcagaagctttcgctgtattcgacaggcttcttgcagtggtcgaacagcgtctggcgcacgatcagcagcggcatcggttctgatagctgcagcgtccggcggatatcgtcgtcggccatcgccgcgctgacctggctgcgcagcgagcccatctccacattattgcgccggaagtaatcgtagagcgagatgccaatctcgtcgatgttggcaatcgccgccgccaccacgtaggacaccgccaccgacatcggccgccgatcgataaagtgaatgcgcttgagttggtagatcggcgctccaaccgccagctggagcctttccgccagtgcggcgctggccggcacccgctcgcggctgatccattgcgtgtccggctgacgcccctgttgcgtcgcctcgcgcgagaaccctttgatgtccgctaaggaatagcgcagcttcggcgcgggccgttgcggctggatgaaggtgccgtagccgcgtgaacggccgatgatgccgtcttgctcaaggcaggccagcgctttgcgcaccgtgatgcgcgagatgccgagccgttcggtgaacaggcgctcgctgggcaggaaatcccccgcgctcagcaatccttgctcgatagcctggcgcaccgaggcgttaaagcgcagatacagcggcatcgcgcccgcgctggccagatcctgcagcagtttttccagcagacgctggttgatctccttgctcatagctgacggaagtcctgtagccgcaatgcgatggcttatttaaggggatttcgccgggcagcgcaactgccgccgccgctgggagaaaatgaggtagagtagtgtgcaatcgccccaggctcggagaaacagactgcccatgagtgacaccccacgacacgcggacgacgcggcaatcctggcagccttcacccagcagcgtcagcaggggctgacccgacgttcggcgctgcaccaggccctgttgcggctcatcaccgccggggaactgccgtggcgggcgaagctgccgccgagccgcgcgttggcggcccggctggcggtggcgcgtgacacggtggaacagacctacgcgcggctggaggcggaggggttcatcagccgaacggtggggcgcggcagctttgtgcgttatcgctgcgatacgctgctcggccgtgaactgctggcgacgcaggcaggccaggaggcgcggctggcggaacgcgagttaagcgatcgcggccgggcgttgctggcggtcagccatacgccgcacaccagccgccaggcctcgttgacgccctcgctggcggatctgcgggcgtttcccatcgattcatggctgcagtgggaaaagcaggcgctgcggcggcacggcgagcggctgttggggtatgccgatccgcagggcttgccggagttgcgtgcggagatcgcgcactatttgcagcgggagcggggcgtcaaggcgacggcggagcaggtgatcgtggtcaccagctctcagcaggcgctggcgctgtgcacgcaggtgctgttcgatcccggcgatgcggtattcgtcgaagagccgggttaccagggggcgaaaaagctggtgcagtcggcggggctgcaggcgcggccgatcggcattgatgagcaggggctggacgtcgggcaactgatgcaggcttcgggcggcgggcggggcgtttacatcacgccgtcccatcactacccgctggggtactcgctgagcctcgagcggcgtctggcgctgttgcagtgggcccagcgtcggcgggcctggatcatcgaagacgattatgacgccgagttcaactacgatcgacaaaccaaggcggcgctgcaggggctggacagcggcgggcgcacgctgtacatcggcaccttcagcaagacgctgtttccggggctgcgcatcggcttcatgattgcgccgccgcagctggtgcggccattggtcgccgccaggcagtttcaggacggctacacctcggcgctggcgcagatgacgctgttccactgcctgcacgagggcggctacgccgagcatctgcgcaatatgcgcacgctttacaaggcgcggttggatgtgctgtacgacgcggtgcaacgccatctcgcgccctggacgcgcccggccttgccgcagggtgggctgcagctggtttgcccgttggcggatgcggcgacggagcggcggttggtggcggcggcggccgaacggggcatccggctgtacggcctggcggacttctacaccggcgcgccgcagcgcggggcgctggtgctcggtttctcggcctacacgccggacgagatcgtgcgttttatcgccacgctggcgcaggtgttcaacgcgctgccgcgggaaaacggcggttaaaattggtctgcccggcgttttgaattggtccgtattacgccgtcgctgcgcggtgtattctgccgctattcggttatttccctaatggaaataatatcttaaccccgtgaggcgctatgaacccatcaaatcgtgaagtgaccatccgcagaatcaatggcgacgacagagcgcaatggctggcgttgtggcagggctatctcgacttttaccgcgccgaggtggcgccgcaggtgaccgatcgcaccttcgaacgcttggggcaggatgaacaggtgtacgggctggtggcggaggatgccgacggccggctgctggggctgatgaacctggtattccatccgtccacctggagcgcggtgggctattgttatatcgaagatctctatgtgtcgccgcaggcacgcggccataaagtgtcggaaaaactgttcgaacaggcgtatcggctggcggaggcgcgcggcagcgatcgggtctattggatgacccaggagtacaacgcgccggcgcgttcgctgtacgacaaaatcggcagaagaagctcgtttatcgtgtatacccgttaaccgcaggaggcgcgtatggcaatgaatcgttatggtcagccgattggcgaaccgatgccggattggcagccggctcgccgcccgggcggcgtgacgctcggcgggcgtttctgttcactggcgccgctcgatccgcagcgggattacgccgcgctgtatgacgctttccagctggcgccggacggccgcgactggacctatctgtctatcgaacggcccgacacgccggcggcgatgttgcagcacctggagacgctgcaggccaacccgacgctggtcaatctgacggtgttcgacgccgccagcgacgcgccggtggggacggtggcgctgatgcgcatcgacgaggccaacggcgtgctggagatcggccacgtcagctggtcgccgttgatgaaacagcgctccagcgccaccgaagccattgcgctgctgctgcgttatgccttcgacacgctgggctatcgccgctgcgagtggaagtgcgacagccataacgcgccatcgcgccaggccgcgctgcgcttcggcttccgttacgagggcaacttccgctttgcggtgatcgtcaaggggcgcagccgggataccgactggttcgccatcaccattgaccgttggccggcggtgcggcaggcgttggcgcgttggctgagtgcggacaacttcgatgcgcaggggcggcagatagcccggctgcaggtgttgcgcggcgaataataagcaaaaaggcggcccgtgggccgccttgtcgttgtgggtctaacgcgcttacttcagctcgtcgaccatggtggtggcgcggccgatatagttggccggggtcatcgccttcagacgggttttctcttcttccggcagcgccaggccatcgatgaacgcctgcatgccggcggcgtccacgcgcttgccgcgggtcagctctttcaatttctcgtaaggcttttcgatgccgtagcggcgcatcacggtctggatcggctcggccagcacttcccagttgtgatccagttcgtccagcaggtgcgcctggttgacttccagcttgctgatccccttcagggtggcctgataggcgatcagcgcgtaacccaggcccacgcccaggttacgcagcacggtggagtcggtcaggtcgcgctgccagcgggaaaccggcagtttgcccgccaggtggcccagcacggcgttggccagccccaggttgccttcggagttttcgaagtcgatcgggttgaccttgtgcggcatggtggaagaaccgatttcgccggcgatggtcttctgcttgaagtggttcagggcgatgtagccccagatgtcgcggtcgaagtcgatcagaatggtgttgaaacgcgctacgcagtcgaacagttcggcgatgtagtcatgcggttcgatctgggtggtgtacgggttccaggtgatgccgagcgaggtgacgaacgcttcgctgaactgatgccagtccacttccgggtaggcgacgatgtgggcgttgtagttgccgaccgcaccgttgattttacccatgatctccacgcgctccagttggcggtactggcgctccatgcggtaagccacgttggcgaactctttaccgacggttgacggggtcgccggctggccgtgggtgcgcgacagcagcgggatatcgcggtattcctgcgccagccctttcagcgcgtcgatgatcttgcgccagtaaggcagcaccacgtcctgacgggcgctttgcagcatcagcgcgtgcgacaggttgttgatgtcttcggaggtgcaggcgaagtggatgaactcggacaccgcgtgcagcgcaggcaccgccgccactttttccttcaggaaatactcgaccgctttcacgtcgtggttggtggtgcgctcgatggttttgatgcgctgtgcgtcttcttcattgaattccgcgacgattttgtcgaggaaagcgtttgcgtcggcgtcaaaagcgggaacttccttgatttctgcgcaggcggccagtttttgcagccaacgtacttcaacctgtacgcggaatttcagcagaccgtattcgctgaaaatggggcgcagtgcgctgactttatcaccgtagcgtccatcaacgggggaaacggcggtcagtgaggataattccatcggtagcaactcctgggatcgattaacaatgagcaacgatattttgcgcctgcttgaacagacgattacgggaaaacattaactgcaggcggctgccgccgacctgttgccacagcacggcggcgcgaatgccggccagcagcgtggcgcgaaccttggcctgcacctgtgggttctgcaggatggccggcgagccggtcacctggatgcgcggcccgagcgggctgaccacgtcgacgtaaatgccggccagcgcgctgatgatggtgtccgattcaagatcgaagtgcgccagctggcgctcgagctggccgaggcgttcgccgagcgtgttcatcgcctgtttgttggcgttgagcttgcgctccagcaccatcaggctgatggtgtagcgggtcagttccgcgcccggccctttgttgttggcattcagcacgcccatcagggtttcgaggccgaccatcaaattgcgttcctcgccgccgaacaccgccagcgtagagggtgggtccatctgcagcaggcttttcagcgaggtctgaaacgcttcgcggttgcattgcccttcatgggccaactgctgaaccaaacgcgccgactggctgatgcccgccatggccagcgtgatgtcataataattcttcgccacgatgactcctgtaaacgcggtgaacggtacatggcttactgcataaggttgtgtgtatcgcaggggtaacggcggcggccgcgaacggtaacgatcgggcgtggctgtaacaacgatgacaacgaatgccgcggatcatgccacaaaatcgagggtaaacccagcgtctaatacgtctgcggtgaggcggaggtgccgtgcggcgcagaactgcgcaaataggcgacgaaaatcgccggcgcggcggcgcgaacttattgttgctgcggcaaataaagtgcggcggctgcatctatactgccaacgtgaaccctcaaataaagacctttatatgcacgtaaaaaacaagcagccactgccggcggtgacgctggcggccatcggcgtggtgtacggcgatatcggcaccagcccgctgtataccctgcgcgaatgcctgacggcggaggagggcatcaccctgacgccggcctcgatttacggctttttatcgctgattttctggctgctgacgctggtggtgtcgattaaatacatttgtttcgtgatgcgcgccgacaacgacggcgagggaggcattctgacgctgatgtcgctggcgatccgcaagctggatgcgcgctgggtgccggcggcggtgctgatcgggctggtgggcggcagcttcttttacggcgatggggtgatcaccccggccatttcggtgctctcggccatcgaggggctgcagattatcgcccccgagctggacagctttatcgtaccgctgtcgctgctggtgctgaccgcattgttcgcgatccaaaaacgcggcaccggcagcgtcggcaaactgttcgccccggcgatggttatctggttcctgacgctggcgctgctgggcctcggcggcattttgcatcaccccggcgtgctgcgggcgctgaacccttactgggcggtgaatttcttcctcgaatacaaggccgtgtcgttctttgcgctgggcatggtggtgctgtcggtcaccggcgctgaagcgctgtacgccgatatgggccacttcggtaaaaaaccgatccgtctggcgtggtttacgctggtggcgccggctctggtgttgaactacttcggccagggggcgctgctgctggccaacccggcggcgatcaataacccgttcttcctgctggcgccgacctgggcgctgatcccgctgctggtgatcgctacgctggcgacggtgatcgcctcgcaggcggtgatctccggcgtgttctcgctgacgcggcaggcggtgcggctgggttacctgccgccgatgcgcatcatctatacctccgatcaggagtccgggcagatctacattccggtggtgaactggctgctgttcgcggcggtgctgatcgtgatcgtcagcttcaaacactccagcaacctggcctcggcctacggcatcgtggtaaccggcaccatgctgctgtcgtcgattctgctgagcatcgtggcggtgaaaaactggggctggccgcgctatctgggcgggctgatgctgctggtcatgctgtgcatcgacgtgccgctgttcggcgccaacctgatcaagctggcgaccggcggctggctgccggtggcgctcgggctaatcattctgctgatcatgctgacctggaagaccgagcgttcgcgcctgatccgccgattgcgcgacaatcaggaagggctgagcgcgctgatcgagtcgctggagaaggcgccgccgaagcgggtgccgggcaccgcggtgtttatggagcgcacgccgcatgcggtgccgctggtgctgttgcataacctgaagcacaacaaggtgctgcacgagcgcgtggtgctgctgaccatcgtcaccaccgacatgccgtacgtgcacaacgtgcagcgggtggcgatcgaacagctgtcggcgagtttctggcgggtggtggcgagctacggctggcgcgagacgcccaacgtgacggacattctttaccgctgcgggctggaggggatgagcttcaccatgaacgagacctcgttcttcatgtcgcgcgatacgctggtgctgggcaaacggccctggtatctgcgcgtgcgcggcaaggtgttccagctgttgcagcgcaacgcgctgcgggcgccggacctgttcgaaatcccgccgaaccgggtgatcgagctgggggcgcaggtggaattttgaataaaaaaacgctgcggtaaacgcagcgtttttcttgggcggcaggcgaattacgccaggcgctgttcgatgatgccgccgccgaggcagatttcgccctggtagaataccgccgactgaccgggggtgacggcggagaccggctcgtcgaaacgcacttcgatgcgttcgtcgtcgagcggggtcacggtgcaagggatatcctgctggcgatagcgggtcttcaccgtgcagcggaacgggccgctcagcggcagacgatccacccagtgcagctgctgcgcgataaggcctacggacatcaggcgcggatgatcgtgcccctgcgcgacgaccagcacgttgttggccacgtctttatccaccacgtaccacggatcttcgctgctgtctttcaggccgccgatgcccagccctttgcgctggcccagggtgtgatacatcaggccctggtgttcgccgacggtctggccgtcaacgctgacgatcgggcccggctgcgccggcaggtagcggccgaggaagtcgcggaacttgcgctcgccgataaagcagatgccggtagagtctttcttcttggcggtgaccagctccagctgctcggcgatgcggcgcacttccggcttctccagctcgccgaccgggaacaggctctgcgccacctgctcgtggctcagggtatagaggaagtagctctgatctttgttgccgtcgacgccgcgcagcaggcggctcttgccgtccacatcctggcggcgcacgtagtggccggtggcgatgaaatcggcccccagatcttcggcggcgaactccaggaaggctttgaatttgatctctttattgcacaggatgtccgggttcggcgtgcggccggccttgtactcttccaggaacagctcaaacacgttgtcccagtattccgccgcaaagttcaccgtgtgcagttcgatgcccagcttgtcgcagaccgcttgcgcatcggccagatcggtcgcggcggagcagtactcttcgtcgtcgtcttcttcccagttcttcatgaacagcccagcgacctgatagccctgttgctgtaacagataggcggtaacggaagagtcgacgccgccggacataccgacgattacttttttctggctgttgtctgacatggggatctcacgaacttgaacacgaaccgtgctgataaaaacaagcgcaggattttaccacgttggccgcgccggcgcactgttcatcttgtgctgcccggcgcccttaatgcggccaggcgaagctgccgaccagcgacagcgggtagcgctccggctgctgatagctgcgaatgctctccgccaccagcgcggaacgcaggttgggcgcctgcaaaatctcgtcggcgctcagccacaggcagcgatcgatgtcgctgtcgtgcggctcggtcggcagcggctgttccagctcgatgacgaagcagaagcgcagaaacggtgtgcgatccggcgcgatccactggtgcaggcgcaggaacgcctgcggcgtggcgcggatgccggtctcttcccacagctcgcgctcggcggcctgcaccagcgtctcgtcggcctccagatggccggccggctgattccacagcgctttgccgttgatggtctcttcgacgaccaaaaatttgccggcggcgtgcaccacgcaggcgacggtgacgtgcggtttgaacatgcggtctccttacagcggtttatcgatgcgccggtagatgtcgtccagctcggcgatgcgggtgcggtagcttttgagcagacaggcggtgtcaccgccgcaccgctggcgcttggtcagccaggcctgctggctgtcctgcatcgcgccgcgcgcgcccatggcgaacaggccgcgcaggaattgatatttggtggccatttgcacgtccagatcgttcagcgtgcggtcggcgcagatggcgcgttcatcgctgcctgccgccttggcgcagtcgaagctggcggcaggggcggcgaacggggccgccagagcggcgagcagcagcgcgatcggggtagatttcatggcgcctccatcagttatcggtctacagggaatcgatgattttccattcaccgggctgcagtgaacccagcgaaagattacccatactgtagcgaatcaggcgcagggtagggaacccgatatgcgccgtcatgcgacgcacctggcggtttcgcccttcgaacagggtgattttcaaccagctggtggggatggatttgcgttcgcggatcggtgggttgcgcggccacagccactgcggctcggcgaccaactccaccccggcgggcagcgtcgggccgtctttcagcgtgacgccgctgcgcagcggcgccaaatcgctctcctgcggcgcgccctcgacctgcacatagtagattttgccggtgcgcttgcccggctgggtgagctgcgcctgcagctggccgtcgttggtcagcaccagcagcccctcgctgtcgcgatctaggcgcccggcggcgtaaacgtcggggaaggggatgtactctttcagcgtggcgcggccggcttcgtcggtgaactgcggcaatacgtcgaagggcttgttgaataacacaatgcggcgcggccccttcggcgcggcgggtttggcggcattcggcttgctgaatcgtttaacgttgtgatttctaacagagaattttttcataacggttgagattacggatgataagcgcattataaccgaatccgtttcggattggcgcggaccgaatattcaagtagtatctacacgcatcttacaaagcattaacaaaattgcgcttgaaggagaggttgatggaaagcaaagtagttgttccggcagaaggtaaaaaaatcacggttgacgcccagggtaaactggttgttcctcataacccgatcattccgttcatcgaaggcgacggcatcggcgttgacgtgactcctgccatgatccacgtggttgatgcggccgttaaaaaggcttaccacggcgaacgtaaaatctcctggatggaaatctacaccggcgaaaaatctacccacgtttacggtaaagacgtgtggctgccggacgaaactctggacctgatccgcgactaccgcgtcgccatcaaaggccctctgaccaccccggtcggcggcggcatccgttctctgaacgtggccctgcgccagcagctggacctgtacgtgtgcctgcgcccggtgcgttactaccagggcaccccaagcccggtcaaacagcctgagctgaccgacatggtgatcttccgcgaaaacgccgaagacatctacgctggcatcgagtggaaagccggctccgccgaagcggacaaagtgatcaaattcctgcgcgacgaaatgggcgtgaagaaaatccgcttcccggagcagtgcggtatcggtgtgaagccatgctccgaagaagggaccaagcgtctggtgcgtgcggcgatcgaatacgccatcaccaacgaccgtgactccgtgaccctggttcacaaaggcaacatcatgaagttcaccgaaggtgccttcaaggattggggctatgagctggcgcgcgaagagttcggcggcgagctgatcgacggcggcccatggctgaagatcaagaacccgaacaccggcaaagagatcgtggttaaagacgtgatcgccgacgccttcctgcagcagatcctgctgcgcccggcggaatacgacgtgatcgcctgtatgaacctgaacggcgactacatctccgacgccctggcggcccaggtaggcggcatcggtattgcgccgggcgccaacatcggctccgactgcgccctgttcgaagcgactcacggcaccgcgccgaagtacgccggccaggacaaagtgaacccaggctccatcatcctgtctgcagagatgatgttgcgccacatgggctggttcgaagcggctgacctgatcgttaaaggcatggaaggcgccatcgccgccaagaccgtgacctatgacttcgaacgcctgatggaaggcgctaaattgctgaaatgttcagagtttggcgacgctatcgttaaacacatgtaagtgtgttcagcgcttgaatgagagcgggagcctaagggctcccgttttttttacggttcaaatatgtgtgaggtgtcggacaggctcactgagtggcgttagccgattcacgcaccaccagcaccgggcaattggcgtggcggacgacggcggtggcattggagccgaggagataagtgatcgcagaagggcggttggaacccatcacgataatctccgcgttgagcgcatcggcgagctccaggatctgatctttaggatcgccgacggcaacgtgcgtggtcactctatcttcaggcacgctgaattctttggccgcttttgccagcccctcggttgctaccgcaatgatttcgtctttagtttctatcgccgccgtggcggcaaagccgaaagcggcataggtggcgcgcgacgggatcaccgccaggaaatggacgtgggagtcttcgagcctggcgagcgcgttgacatgcgggatgacctgctgtgttaattccggttcggtaatatccacgggaaccaaaatagttttgtacatactccctccttatcgttttcaaaaaactccactttttggattatagctgcttaacgcagggaaaggggagatccaggtggcagaactaaagaaacagttttgctaaattagcaatactaatcgaaagcttgctactggacgattagtctaacactctactacctgggggtgaggtttacctggacgttagaggcatagaaggtgctaatttgctgaaatgttcagagcttcgtggtgctacctttaggcatatttaatacgttcggtgttttaatggaagacaaatctcagcgtgttcgtcttgatgcatatgtaataatcattgacataattccgtaaggtgacttgttaatgattcggaaaaataatgtacctgaatataggcatttttcggttgtattattttaacgtttttatgatttttattagtattgaggaatctatttttaggtcaaaatagactatcgatcttctatgggttatggcttgccgatatggtttctatggcttttttttgatataggtatagatgattatgtaggaacttaacccaccatgtttttacattttctaataatacctaattgaactgttttgtttggaataatttgatggtttagtgttatagataatagttgcctttaacataaatttttaatgacgatcaagaggtgcataatgaattttagtttgatactttacagatataatactgctctggatagaggcagaaaaacagtacaattatcaattgcaataatgactatttggatggcgttatgtgtattcgtttttaaaattgttgatctttcattcaataagggtgacttaaacgccagtattcatgttgactttgactgggatgtgttttcttcatgggggatcgtgatatttattacattgattggtgccgtgttccatggattccatgcgtctaatgctgaattaaaaaatgcgaatgcaataatagacgacttatttatatccgaagataaagatatggacaaaaagttaaccagtctgaacaatatcgccagcgagcttgagcgttattgtatcaaagcatctgcactgaatttgatttcatttatgcttattttcttcagtttccttcatggttatctatcaattggagaaataatccaagggcttagggagagtaattacctggctttgatagtcgtgtctgtatttatattggcttttgttgcatattatcatgatgtgattgtttttcttaatgaccgaaaacgaaagcgcaacaaagaaaaggtgtaaattattaataatttcagtatgttgattgttaatggggattgatgtgtcttatcgctatatacatttttttcatttttttaaattgagagtgtatttgacatgtgaagaaaatatgcgtttaaccttaagggagagggctgtttcatcgaaactctcgtcttctacgctgacggctgctttttatgagtcttacatcacttttcgattgtgaatattgagctgctattgttattgttttttaactgacaacatccataaggacagggatatgaaaataacgcattcaggctataaaaccggcgttgctacagtattggcggcgatgaccgcgctggcattaacggggtgtgccaagagcacggcccccagccaaaccgatccggtaaataaagaggttgacgatcttttcaccaaccttggcgacccaaagacgccggcaccgggaaaagagaaagaacactatatcgcccagttgcaggccgcgattcaaagccatttgaaagatgccgaagcctactcaggcaagcgttgcacattgagcatcaagctggcgccggacggtatgctgatcagcattcaggctgaacaaggggaaccggaactttgccaggccgcgatcaaagcaatcgccaatgcgcgtctgcctaagccgccaacggccgcggtttacgaagcggtcaaaaacagcacgttggaatttcgcccgcagtgaataaacaacgctgtttccgtgcaacgctatcccggtcaaggccgggattttttattgccgtcaccctgcgttaatgggtgaaaatcactaaagcctttgatgaatggtgacgataacccttaaaactcctgattataaaagagtggccatgcgttttttctgggtcaacatcggtggcagcgtcgcggaagttttgaagggcgaattcttgtgggcgccgcaatatggaataaataagactgggaacatgtttaaacctgccgggtgggaaacggtcaaaaaagtcaaagagggtgacctgattttttgccacaagggtaggaagattatcggcgtggcgacagcggtacgcgatgcttactctgcaccgcggcctgagcatcgggtcgcgggaccgccgcatattgcgggtacccaagtcgatttggaactgacgcgtcttgaactccctattgatgtttccctttttaatcaggcgttcatacgcatgcacaaccaggcttgccttccgcgcgtttttaataagaaaggcggatgcaccgaaaactatatgtgcgagatccccgcgccggcagccgcgttgatcgccggttttatctcggaaaatctctctatcaacctccatgcggataccgtcgaaatcaccagagaggtcggtggtgagcaagaaagggtgattcaggcgcggattgggcatggtccctatcgcgataaaatgtttaagcggtggggaaatcggtgtgcggtcacggggattgctgagccgtccattctcattgcctctcacatcgttgcctggtcgattgcgaccccagaagagaaagtggatccgcacaatggtctgccgttaatccccaatctggacaagctgttcgatcgcggcacgatcagttttgccgatgacggacgtttgctgtatccgcagacgaagagcagcttgttagatgagttaaagatcccgctggatgcgaacattagcgggttgtctgaaaagaacagagcttacctgcggcggcatcgagcgagatggggttttgaagtagagccctgatgcaggtttgccaaatcaggaccggggctcttaccgatacatcatcgcgctcacgcgctcgcttcggtctttaaaaccgttgctgcgcatcgtgaccacatagtagcgatagtgatgtttctgtgcgtattcgcgcaccagatcttcggcgaacaggccgctgaaggtgacggtggtgacaaacgtcaggcctttcacttcgtaggtgctgatctcttgcggggtgccgatatacggcggcgggaacacggttttgtggaactggcagcccgccagcagcagggtaaacagcagggcggcgggtatttgcggtatgctcatcgggaaaagctttccttccttggcgtgtgttttagtaactctataataggattacaaaattcggcggggatgtaaaaattatcccgcttcggttgccgtttcgttgaagcggtgtcgccgccccccatcagaatgaagggataaacatgtttgttcgtcttgccactgaaaccgatgtcgcagccctgatcgccctcgacagcgtcgccgaacacgaaccgcagcgcgcggcgcagatccgggcctggtgcgggcagggggattgctatcttgccgaggaacaggacgtggtgatgggctatggcgtactgcactatcacttcttcggctgcggttttatcgagatgctgatggtcggcgagcgctatcgccgccggggcgtcgggcaggcgttgattacggcattgaagtcccattgccgacacccgaagctgttcacttccaccaatcgttccaacctgccgatgcagcggctgctgctgaacgccggatttgtcgccagcggccagattgacaatctcgatgacggcgatccggagcaggtcttttttatcccgctgcgctaatacaaccggacatcgaccgcctgctgttgcagccaggtgctgacgtagccataagcggcatagaaggccagcagcgcgaagatcagcaccgaaagcgaggccaaaaatttgacgtcgccgtgcttcgaaagctggtaagcacaaaagataaaggccagcaggcacagcagggtgaaggcgatggccagcgtggcgtagaaaataagcataacgaaacccgttcttccttgtgagcctggcaaggataccacagacaaaaaaaggggcccaaacgggcccctgcgtgattcgctgcgggaggtttactccaccgcgtcgggatggtttttgccttcctcgataaattcttcgtcgatctcttcgatattctcctcgctgtcgcggccggacaggatgttccagcaggcgatgaacagcgcggcgatcaaggggccgataacgaagccgttgatgccgtagatctccatgccacccagggtggagatcaggatcaggtagtccggcattttggtgtctttgcccaccagcagcgggcgcaggatgttgtccaccaggccgatcaccaccacgaagaacactaccaggaaaatggctttccacagcatgccggtggcgaagaagtagatcaccgccggcacccagatgatggcggagcccacggccgggatgatcgacaggaacgccatcagcgcgccccacagcaggctgccgtcgatgccggtaaagtaaaacgccagcccgccgagcgcaccttgcaccacggcgaccaccaccgtgcccttgacggtggcgcgggagacggcggcgaacttgacgaacagatggtgtttcacgtgctgggagagcggcagcgcttcgagcgccaggttcaccagataggggccgtctttcagcaggaagaacagcagatagagcatcacgccgaagccgacgacgaagttgaaggtgcccttgccgatcaggaacacgctgcccgccagatattgcccgcccttgagcgccacctcggaaagctgcttttggatctcggcggcgctgttgaggttatgctccgccaggaagcgctgcgcccagctgggcaggtggcgcataaagtccgccagcatggtcggcaattggctgttgttggtctgcagcttggtgtagatcacgttgaattccatcgccagcgacgaggcgatgatcgccaacggcgtgaacacgatcaggcaaatcagcgccaccgtcagcagcgacaccacgccgttgcgttcgccgacgtactgcttcaacttctttttcaccggatggaaaatcaccgccagaataaccgcccacagcaccgaggagtaataaggccccagcacgtcgagaaaggcggcggtaacgatgaacaggatcagaataaagaatcccttggaaatgcctttagacatcatagtcgtccctcaaaagatgaattttcagcatagatgaactgaatgaaaacaacactatcatcacctttgcttaaccggtaggggatttttagtggcgtattccatagggttattaagggcaaggcgggcgccgcacggtgaacaggcggcggcgtgagaaaagaaagagggctaaataattaacaaaatttatcgattgtgtttcattttgtgagccgcgcttgccgcctgcgccaggctttcctagtttttaggagggcggccgttcgcccgataccacgaaggagtatgcaaatgactgaacacaaacgacttgccgttatcgaaaaggtgctgctgatcgctttcgccggtgtgctggtttatcttgccgcgaccggcgccttgtcattatcgggtctggaccatcactggccttatccttcgcgctgagcgtgattgatctcaccacgcagacccgataacgataactagcagctgtaccctacaacactggatcccagaataaatcgcccgtcattcgcctcgttctttggcgcgcagggcggtgacgctctctccgccgacgccccagttgtcggtggctacctcgtcaatcaccacgaaagtggtgtggcgtggcttattcagcacctgctccagcagcgcggtggttccctcgatcagcatgcgcttttgcgcggcgctgaccccttcgtcggtcactttaatgttgacgtatggcatggcgtttctccccggtttcaccagacgccggcggtggcgccgccgtcaaccgcgagcgccgcgccggtaacgaaattggcgtcggtcagatacagcaccgcatcgacgatgtcctgcggctggccgacgcggccggttggcgccagttgccgcatctgcgccagactctgttcatcattttgatgcatcggcgtggcgatgatgccgggcgccacggcgttgaccatcacgttgtgcggcgccagctccaacgccagctcgcgcacggcgtggttaaggccgcctttaatcagcaccggcagcaaagcgggcactttgctgttgggctgcatggcgatcgacgcggtgatggcgacgatgtggccggcaccgcgttgctgcatatgccgggcggcggcctgcgccgggtagaagaagcctttcagattggttgccaccatcgcgtcgacctcctccggcgtatagtcggcgatcggcttggcgataaatatgccggcgttattgatgagaatatctacctgaccaaaagcctgtatcgccaggctgaacaaccgttcggcggtttccggcagcgcgatgtctcccggcgccagcagcagattggccgggcggccgagtttgtccgccgccgcctgcagccgttcaagcgaacgggcgtttgcgacaacctgatagccgcgcgccaggtaggcttgcgcgatggcgaagcccaagccgctcgatgcgcccgtgacgatgaccgtttttactttgctcattttctctcctcgacaggatagggattgatcgtacgtgaacggtaatccatacctgatgattgaaaaatgagggggaaagaactttaatttataccttatgtaatgaattagcagggagagacatgcaacgccattttgacgacgttcaggtgggcagcatcgagctgttttgcctgacggtagaaaccggcagcttcaccgcagcggccaatgccgccgggataacccctgcggcggtcagccgctcggtcgcgcgtctggagacgcgattgcaggcgaagctgtttatccgcaccacacgccagatgcgcgtcacggatgccggccagcgttattacctggaatgtcgccgggcgctgagccagctgatggaggccgaggcgagcatttccggcgaacgggacaaaccggtgggcacgcttagcatcagcgcgccgacgctgtacgcgcattttaggctgttgccgcgtttgcccgagtttgcgcaacgctatcccgatctcaagctgaatctgcacgtcagcaatcagaatatcgatttctccgaagataaattcgacgtcgccattcgcggcagcgagctgaacgactccggcctggcggcgcggcgtctagaggaggctgaactgatcgtggtggcgacgccgggctatttgcaacgccaccctgcgccgctcacgccggcggatctggcccggcacgattgcattcagtatgcgttgcccagcaccggcagaaaaaccgcctggacgtttaaggttcagggcgaaaacagcaaagtggatactgccgggcgctggctttgccaggaagattacctcgccacgctgacgctggtgaaaagcggcgccggactgatgcaggtgtatcgctttaccgtcgaacaagagttgagcagcggggcgctggtcgaggtattgaaagattacgccggcgcctcgcgtcccttcatcctgctttacccctatgcgcgctttgtcccgctgaaggtgcggaaattcatcgatttcctgacgcaagcgtagccgccagcgccaataccgctccagacgccgccgccgccagcaccagccacgccggggcagcccagccggctgcggccacgatggcgctcagcgcgaccgggccgatcacctggccgaggtagtttccctgcatcaccagcccgaggctcagcggcagcagcgtcggttccggcgtcgccgccggcgtggcggccaaaatggtggcgggcagtatgccggcgatggcgcagaacaggaaacacagcgggatcagcaggccgttgggcgtcatcggcaggaaaatgccgacgccgaagaccccgatcaacaggctggtggcggcgagcagcgttctggcgggtagcccgcgcgacagcagcacgccggcggcgaggttgccgacgatgttggccgccaccgccgccgcgctgatgccgccggcggccgccagtgacagaccgatgcgctgcatcagaaagatcggcagaaaggtcatcaccgagaaaaactgcaggttgtatgtggtgaacatcagcgccagcaacagcggctgacgcgcccgcagcatcgcgcccagcgcttgtcgcagcggcaacggcggagcgtgcgccttggcggcgcggcgggacgtggtcagcggcagcagcagggcggccagcagcgtcaacgccgcaccggcctgccagctctgctgccagtcggccagatgcgggccgaaaaacagtgaaatggcgatgcccgccggcatgaaggtgctccagatgccgaacaccaggttgcgctgcgccggggcgacgatgcggttcagcaccgccggcgaggcaaccaccacgatcacgaagccgaggccttcgacaaagcggctgacgatcagcccgctgaagttgtgcagcgtggcgccggcgaagctggcggcgctgatgatcagcagcccgagcgccagcaggcgccggtcgccccagcggcgcaccagcagcccggcggcgatgccaccgaacactccgacgaagggaaaggccgaaatgacccagctgagcgcctccagcgagcggccgaactcggcctgcagcgccggcagcgcgatggtggccttgcccacgtgcagcgccgcggcgatgccggcgaacagcacgttgatgacggccagccagggcgtggcggcgggggaaatgcggtcgatggcgtccggtttaatcgcagtcataacactctccagtggcggtaacgccctcactatgcgtctgcgctacgacagaagtcgttcaaatgctgcgctgtcacgtggggaaattattcatttcgagctttaatttgcgcgcctcgttgtttggtgcgccagcgtgccgcccggcgtggacgctcgcccccctgcagcggtttactgttccggcacgcagcaggcgtgttgaattcactttataaggagcagtgtatgtcagagatgatgaacgagagtagggcgccggccattgaatggagctatggcggccggggcgatgatatcagcagcagcctgagcctcgacacggttgaggagcagccgcagggtttcttgatgacggtcgatcggccggtgcagatctttacagaggcgctgtcgccgatgatggcctttgtcacgctgctgcgcccgctgtatgccaagaccagcgcaggcttccagtatgtgccggtttctaacccctggaccgacgtgcagcgcctgccggccagcgcggggtatctgggcgtgcaggtcaacgccgggctgttcttccacggcgccaagccgacgcactataaagatcgcgacggccagatgaaaccgatcgacggcggcactattttgcagaacatcaccgtgctgcatcaggtggcccagccgctggggcctggcgaaggcgcggtctgagccggcagtgctatcacggggccggacgcggccccttatcgcgccttgaaaccgtgcgccggttgggtaaaactggctgtctattcaaggagaagagtatgtacagcgacaacgagaaaaagttttatatcatcctcaaccgcaatcacgaaccggccacgctgtttaacgcctcctgccatctgacggcgggcatcaccgatctgatcgagcagcgcgagtttcaccactatccgagcagcctcgacggcgtcagtgccaatatgagccactacccgatcgtgatcctgcaggctaaaaacagcagccagctcagcaacctgatcctcaaatgcaaggaggagggcgtgctgtccaacttcttcaccaccaccatgctgtcgcactccgccgagcagcagatcgccgacaccgccaataccccttacgagcagctggatttcgtggcggtggcgctctacggcgacactgaacagcttaagccgctcaccaagaagttctccgtctaccgttaatcgcgaacggcatcacatcaggggcggcaacggctatgatatttttccatcaaatcgttgatggagatgaacatgagcggcaagaaaaccaccatggcggccatcgccagagaggcgcgggtcggcatcgccaccgtcgatcgggtgatcaaccaacgcgcgtcggtgcggcccgtcacccagcgccgggtgattgaggcggcgaaaaagttggggttcgcgttggagaagtcccactgcctgtcggcggtgctgggcaggccggaacgccgcctgagaatggggttcatcctgctgcggcgcgaacactctttctatgcgcaactggccgatgagctgatggcgcaagcggcgccgtatcatgagccgggtcagccgccgcagtttatctttcactctctcaatgccatcggcgacaccgccgccgccattagccaattgagccgccaggtggaagcgatcggcgtgctggcgctggatcaccccctgatccactatgccgtagaagaagccgcccaggcgggcatcaacgttttcgcgctgctgtcggatttatcggtgcccagccgcgccggctacatcggtctggataatcaaaaagcgggccgcaccgccggctgggcggtggatcgtctgtgccggcggcagggcgacgtcggcgtgatcatcggcgacaaccgttttacgtgtcaggaggcctgcgagatcggtttccgctcctatctgcgtgagcagatgagcggtcagcgcgtgctggagccggtgcgcagccatgaggacgcggaaacggcgcgccgggtcacgcgtgaactgctggcgagccacccggagctggcggcgctttacgcgccgagcggcggtgtggagggcattattcaggcgttgcgagagagcggccggcagcgcgacatcacgctggtgtgccacggcccggtgcagggcggtgaaatggcgctgctcgacggcacggtggatctgctgctgtgccaccgcattcccgaattggccgccacgatcgtcgagacgttgctcgccgccgatgaacaaccgggattacggcacatcattaatcgcttcgatgtgatcaccaaagaaaacctctgacggccgatgagtggtggttgccgagagccgcgcgcaaccaggcgccgcctatatttgattaaaaaccatcaaatattttatcaaaaatagcgcgatctctatcaaaaaataaaattttcattattgatggttttggaatttttgtttgatactgtcggcattccctgcaaaaaaggagccgtcgccatgactttgcctatcgccaatgcgccctgcagttggggcgtagatgatccgaacaacccccatttgccgccctacgccacggttctgcaagaagcgtcggcggccggctaccgcagcatcgagctggggccgtggggctatctgccgacgcagagcgaggcgctgtgcgccgcgctggagcagcatcgtctgtcgctggtggccggcacgatttttgacgatctggtcagcgaggcgaacattgagcgcctgctggatctgacgcatcggatttgccgcaacctctcgcgggcgcccaaggcggagccgagcgagggcgatcgcgccgcgccgccgttcctggtaattatcgatttcggcaatccgcaacgcgccagattcgccgggcgttcagatttagcaccgcgtttgtcgcaggcggagtggcagaggatgatcgggcacattacgcgcatcagcgaactggcctggcgggaatacggcgtgcggccggtggtgcatccgcacgccggcggctgtatcgagttcgccgacgaaatcgaccggttggcggcggacattccgcatcacaccgccggattgtgcctggataccggccatctgtattacgccgggctggacccggctgcctggctgagcaagcactttgaacgtcttgattatctgcacttcaaagacgtcgatccgcaggtgttccgcgaggtgctggcgcgcggcgtcgattttttcaccgcctgcgctgagggcgtcatgtgcccgttgggcagcggggcgatcgattatccgcagctgcgtgcgctgttggccgagcgcggataccggggctggatcactatcgagcaggagcgcgatccgcgcaatgtgcagggcagcctgcaggacgtcaccgccagcttgcgctacttgcgcggcctcggcttttaaccaggagaaacacgatgatcaacggcagcaaacctttggcgagatcgttgcgctggggcatggtcggcggcggcggcaccagccagattggttacatccaccgttcggcggccttgcgcgacggcgcgtttactctgttggccggcgcgttcgacattgacgctgaacgcgggcgtgattttggccggagtctgggcgtggcggcggagcgctgttatgcggattatgccgagatgttccgcgccgaagccgcgcgggcggacggcatcgaagcggtctcgatcgccacgccgaacaacacccattacgccatttgccgggcggcgctggaggcgggattgcacgtggtgtgcgagaagccgctgtgtttcagcgtcgaagaggcacaggcgctggcggcgctgtgcgagcggcagcgcaaagtcatcggcgtgacctacggctatgccgggcaccagatgattttgcaggcgcggcagatgattgccgatggccggctgggggaaattcggctggtgaatatgcagttcgcccacggctttcacgccgcggcggtggagcaggataatcccagcactcgctggcgggtcgatccgcgctttgtcggccccagctatgtgctgggcgatctggcgacccacacgctgttcctggcggaaaccatggcgccgcagctgaagatccggcggctgatctgcagccgacaaagctttgtgccgtcgcgcgcgccgttggaggacaacgcctatgtgctgatggagtatcacaacggcgccatcggctccgtgtgggcttcggcggtcaactgcggttcgatgcacggccaaaaggtgcgcattgtcggtgaaaaggccagcctggagtggtgggatgaacaacccaatcagctgcgcttcgaagtgcagggcgagccggtgcggatcctggagcgcggtatgccgtatctcgccgcgtcggcgctggcggacgatcgcatcggcggcggccatgcggaggggctgtttgaagcctggtcgaatctctaccgccgcttcgcgctggcgatggacgccaccgatcggcgcgacgcggccttcctggccgacttctggtacccggacgtgcaggccggcgcgctgggcgtgaagtgggtggcgcgctgcgtgcaatccgccgaaaccgacgccggctgggtcgccttcgactgagcgcgcgattcgctcagacgctggccccgtcgtagctgtggatctgtaacgcatcgagcgcgacgtcaggcacgcagcgcagattgacggcgcacatcgcggcgccgtccggcgcggtgccgtaggcaaagggctgggcgccgcagactcggcagaactgatggcggatcttgtgctgattgaaggtataggtgctgagctggtcttggccgctgctgagcgtgaacgcgctgatgggaaagaaagacagcagcaggcctttgcggcggcagatcgagcagttgcagctgagggcttcggtcggcagttcggcgtctacggagaaggtgacggcgccgcagtggcagcttccctggaatgacatggcgatgatcctgtaacaggggagggtgtttgcccagtatagtgcaatttatcgtcactcggctgcacccggtctggtttccttagtaaatgcacggttttctggtaggttagaggttaacgtcatcaaaaggagatcgcgatgttagaacattactatccggccaatatgggcgccgaaccggtcacggacgaacagcacaaacggctggtggcggtgcaggcggcgctggagcttatcaaggctacgctgtcagacaccaacgatggcaacggcgtggacttccagctgaaggcggcggagaagcacatcggtccgatggccgacgccattcaggaagccctgaagtaacggttcgccgtcacgtcaaccgcccgtatcgggcggtttttttttgcgccgattactgcgatttttttagtggcgcattgcctttttcccggctggtgccacgagcggcgcgatcctactctagcgatccgagtcctcatcagggtcatgctcatgttccgcttcagcttcttttctttcttattgccgtgccgccgatgcgtcacccagttggccggcgctgcgctgttgctctgcggcgttatgcaggcgcaggccacgcaacgcatcgagttttcaccggaccccgccggcgcctaccctgagggcattgcctggaatgcacgcgccggtgcgttccttatctcctccctgcgcggcgggcagcttggcctggtctacccggatggccgctatcggcggttttccaccggcaaggggcttatcaccacctccggcatgctggtggacgccgaacgcaaccgggtgctggtgtgcaacgaagacgtgggcgtgtcccgcaactctgccgccggcacgcgcaatcgcgtggcgcaggtgctggagttcagtctcgataccggcgtgctgcagcagacgtacgacctttcatcgctaagccatgggccgacgctggccaacgatctgacgctcgacgcacagggcaatatctacgtcaccgacagcttccagccgcagatttacaagattgatcgggcaacgcgccaggtgtcgattttggtgcgctcagcgcgcttgatgccggccgacgcacccgccgctgcgcagggcacgcggccctatctcaatggcgtcgtgtatcacccggacggcttcctgattgcggcggactacacccgcgggctgctgtggaaggtgacgctggataccacgcctgcgataagtgaaatcaggctgccgcagcggctgaaagggccggacgggctgcggctcaaaaacgcccatgaattggtgatcgtacagtcttttccgggtgaaaaggggagcatgtccggtgacgtgacgctgctctcctcgaccgacggctgggccagtgcgcgtatcgctgcggtcgccgcgccgccgggattggatgggccgaccggcgccgcgctgcgcgatggcgaggtatgggtcgtcaactcccgttacccccggctgtttgctgacgtcgctcaggcggaaagtaccaagacgttcagtatcgtcaaggtagcgttcgaaccggtcgcagcggatggccgccgatcggcgacggttgccaacccggtcggaataggattaaatgcgcactgactgtataaataaacaggtgcgctgcgatgagtctgatgttgaagggtgaaaagattgaccgtaaccgctttaccggcgaaaaaattgaaaacggcagttttatgctgtgcgatttttcgggcgccgatttgaccggcaccgagtttatcggctgccagttttacgatcgcgacagccgacagggcggcaatttcagccgcgcgatactgaaagacgccagcttcagaagctgcgatttgtcgatggccgatttccgccatgccagcgcgctgggggtggagatccgcgaatgccgcgcgcaaggcgccgattttcgcggcgccagctttatgaacatgatcaccagccgcacctggttttgcagtgcctatatcaccaaaagcaacctgagctatgccaacttcgccaaggtggtgctggagaaatgcgagctgtgggaaaaccgctggcacggagcgcaggtgctcggcgccagcttcagcggctccgatctgtccggcggcgaattctccggtttcgactggcgcgccgccgatgtcacccaatgtgatttgagcaacgcggaactgggcgagttggatttacgcaccaccgatctgcagggcgttaaaatggacagtcaccaggccgctcaactgctggagcggctggggatcgcgatcatcggctgagtaactgccgcagtcccagtgcgatgatcaaggtgccgcaggcgcgatcgatccaagccttgctgcggcggtaggcgccggcgacaggcgcgtgcgacaagaccagcgccaccagcccataccacaagctggctatcaccgcgacctccagcagcatggcgaggaaagtcggtgtagaaacatggctgggcgccgctgatgagaagacggcggcgtaaaacgcaatggatttggggttggcgatgttggtggcgataccctgtagaaaggcggcgcgaaaaccgctttttccggtggccgctggggtgccggaagagggcgccgcctgggcgataagccgatagccgaaccacattaaatagccagcgccggcgactttaatcgccatagccaaccaggggaacagggcgaaaaccacgccgatgccaagaagggcgctgctcgcccagaacagattgaccagcacgatgccggccaccaaggcaaacgcctctgtccggcgtgctgaaacggctttgtgagcgacagcgacgaaattggggccggggatcaccacgccgacaatatacacggtgaaaacggcgagtacggcggacatatcgatcatggaagattgcctgttacaacaagagtaccgttagttttataacgaatcccgcacagaatccacccgaccgatcgcgccgccgctccgatgacggccgggaagaattacgcatgcggcacattccggtgaatgtctgggacaccgaggcgatggcgctcgtcgaccgtttgccgagggggcaggcgagcggcccggcgctggactaaacttaagatgcataagaaacatgcggcaaggagcgccatcctgtttacggatctgacgaggagggccgccatcatggcttaccggcatatcgttgtcgccacggatctcagcgaagacgccgagttcctgctgggcaagggcgccagactggccgccgcgctcaatgccaaactttccctgatctatatcgacatccaccgcgccggctattacgtcgatctgggcgtgggcgattacaactacaccgatcgcaccttttcggagcgggtgaagaatatgctcaatgcgatcaaagggcagtcgtcgtatccggtggcagaggtgatcgtcagccgcggcgcgttgacagaagagctgaaccgggtggcgaaggaaaaagggttcgatctggtgatcttcggccatcatcatgatgtctggagccgactggtctcttcggcgcgtcaggcgatcaacgagctgaacgttgatctgctggttgttcccatcgagaaaaaatagtcgcggccgcctgcgggcggctgccgttttccattcgcatcgcttatctctgggtgaagataactgcatacctgcaataattccgcttgctgacaatccgcccgaaaaatagtgactgcctggaattttattttttccatcaatatgttggccaaaatccgataaaggttaatccagcgcattgaaatcactgtcatacctccttttggttaataaaccgcacgttttgactggctctccgcgaagaggcgtcttatcctcggggcaatgagatttgtatgacttatataaatacgttcacatggaggaggtctcatgcgttttgacaataaagtcgtggttatcaccggtgcgggcaatggcatgggggaagcggcggcgcggcgtttctccgccgagggcgcgatcgtggtgctggccgactgggccaaggaagcggtggacaaggtcgccgcttcgctgccgcagggccgggcgatggcggtgcatatcgatgtgtccgatcacgtcgcggttgaaaaaatgatgaacgaggtggcggaaaaactgggccgcatcgacgtcctgctgaacaacgccggcgtacacgtggcgggcagcgtgctggaaaccagcatcgacgactggcgtcgcatcgccggggtcgatatcgacggcgtggtgttctgctccaaattcgccttgccgcacctgctgaagaccaagggctgcatcgtcaataccgcgtcggtgtccggcctgggcggtgactggggcgcggcctattactgcgcggcgaaaggcgcggtggtcaatctgacgcgcgccatggcgctcgatcacggcggtgacggcgtgcgcatcaactcggtctgcccgagcctggtcaaaaccaacatgaccaacggctggccgcaggagatccgcgacaagttcaatgagcgcatcgcgctggggcgtgcggcggagccggaagaagtggcggcggtgatggcgttcctggccagcgacgacgccagctttatcaatggcgccaacattccggtcgatggcggggcgaccgcctcggacggccaaccgaagatcgtctaagcgttaacgcacaggcccggccatgatgaccgggcctgctgttttagacgccgatgcggtcgcgcagcgtgtagtaggccgcgccgatggcggtgaacgggatctgcagattgcgcccgccgaagaacggcaggggcggcagtttggcgaaggcgtcgaagcgttcggcgtcgccgcgcatcagctcggcgatcagcttgcccgccagatgggtgcaggtcacgccgtggccgctgtagccctgcatgtagtacacgttattctccagccggccgaactgcggcatgcgcgacagcgtcagcaggaagttgccggtccaacgatagtcgatacgcacccctttcagctgcgggaaggtcttcagcagctttggccggatcaggttgtcgatgtcgtccggatcgcgcgcgccgtacaccacgccgccgccgtacagcaggcgatgatcggcggtgatgcggtagtaatccagcaggtagttacagtcttccacgcagtaattctgcgggatcagcgcctgcgcgatctccggcgccaacggttcggtggtcaccacctgagtgccgcacggcatgctgcgtttggccagccgcggctccagcttgtcgcccaggtaggcgttgccggcgacgatgacgaagcgcgccttcacctggccgttggcggtgctgatgagcgccggttcgccgtggcggatgttcgtcaccgccgattgctcgaagatgcgcccgccctgcaggcgaatcgcctcggcctcgcccagcgccagattgagcggatggatgtggccgccgctgtgatcgagcagcgcgccgacatagcgatcgctggcgacctcctggcgcacccggtccgcatcgagcagctcgagctgggtattgccgtagcgctcccagttgcgcttttgctcgatcagcgcatggaactgcttgttgttcagggcggcgaagatgccgccggggcggtagtcgcagtcgatggcgtagcggctgatgcggctgcgaatgatctccgcgccttcaaacatcatgctgccgagcaggcgggcgctttccgcgccgtagcgctcctcgatcacatcgatgtcgcggctgtaagagttgaccaactggccgccgttgcggccgctggcgccgaaaccgatgcgcgccgcttccagcaccaccacgtcgtaaccggcttccaccaggaacagcgcggaggagaggccggtatagccgccgccgatcacgcagacgtcgcactcgagagattcattcaattgcggatagggctgatgagcgttggccgtggccgcatagtagctttttacgtgttcagtcatgagagaagcccttattccagcgagatccaggtggttttcaattcggtgaatttgtccagcgcgtgcagcgatttgtcgcggccgttgccgctctgcttatagccgccgaacggcacggtcatgtcaccgtcattgtagttgttgacgaacaccgtgccggctttcagctggcgcgccatgcggtgcgcgcgcgccagatcgcgggtccagaccgcggcgccgaggccgtagtcgctgtcgttggccagctgcagcgcctgttgctcgtcgtcgaaggcggtcaccgccaacaccgggccgaagatttcatcgcgcgccacgctcatggcattgtccacctgggtgaggatggtcggccccagatagccggcgtggtcgccctgtggatggtcgcgcccgtcgaggaacagtgcggcgccctggctcagcccccgctcgatatagccggccactttctcgcagtggccgctgtcgatcagcgtgcccatcaccgtggcgggatcgagcgggtcgccggggatgaaggccgccgcatgtttgcgcagcgcctgcaggaacgcttgctcaatgctcgcttcgaccagcaggcgagtgccggcgatgcacacctgcccctgattatagaagatgccggcggcggcgctgcgggcggcctgatccagatccgggcagtcggcaaagacgatgttggcgcttttgccgccggcctccagccagacgcgcttcatgttcgattcgccggcgtaaatcatcagctgtttcgccaccagcgtagagccggtaaaggtgaggacatcgacgtcgcggtgcagcgccagcgccttgccggcgtcgtggccatagccgggcaccacgttcagcacgccgtccggcaacccggcctgttgcgccagtttgccgagcaggatggcgctcagcggcgatttttcggagggtttgagcaccacactgttgccggcggccagcgccgggccgagcttccagcaggccagcagcagcgggaagttccagggcacgatggcgccgaccacgccgatcggttcgcgctcgatcagcgccagcgcatcgcggccggtgggggcgatttcgccgtacaccttatcgatcgcttcggcgtaccagcggatgcagcggatagcgcccggcacgtcgtcgcgcaggctgtggcgaatcggtttgccggtgtccagcgtttccagcagcgccagctcttcgtgatgctgctccatcagatcggcgaagcgcagcagcgtggctttgcgttgcgccggcgcggcctgcgcccagtcgccgcgttcaaaggcggcgcgcgccgcgctgaccgcccgatcgatgtcggcggcttcaccgcgcgcgacctgcgccagctcacggcggccggcgggatcttccacggcgaaacgcttccccgcggcggccggttggtagcggccgtcgataaacagctggtgctcaatcttcagggcctgcgcccgttgttgccaatactgcaaatggtgaaagttcatgcttggctccgttgatcagaatgtcgtcggcgtatgggcgctgataatccggcaaatgcgcgccgacgtgttgctgaagctgtggggaatgccggtattgatggcgtagctctgcccggccagcaggtgatagctctggccgttgacctgcagcaccacttcgccctccagcagcgtgccgatctcttccccttggtgtttgatgcgctcgccggtggtggtgcccggttcgtaggtctcgatcatcattgccagcgtgcggttcggatcgccgttgtggatcagcttcatcgaaacgccctggctgccgatttcgatcagatcgtcactgcctatcacgatctgcggctgcgccggtttttccggctcggcgaaaaacgccgacagcgacagaccgtataccgtcagcagcttttgcagcgtgctgatggccgggctgaccttatcttgctcgatagtactgatggcgctgtgggttaacccagacagttcggcgacccggcgctgcgacaaccccaattgttgacggatctgcgacagacgttttcccggtgccaagctgacgtcgctcatgggcgtttttccttttgatagttccgacaggcggtgatgaaaccatcaaacaacaggcgcgacagggcgtactcgtcgctgttccactccgggtgccactgcacgccgagcgcgaagggctgatcgcgcacgctgatcgcctccaccagtccgtcggcggcgtgcgcctcgatgcgaacgctcgcgcccagggttttggcgccctggccgtgcagcgagttcacccagaatctgttgcaatccggtatcagttgcgaaagtagccccccttcctgaacgatgacttcatgggcgggggcgtattgctgttccagcggcaggtcgtgatcttcacgatgctccagcagctcgggcagttcgtacaggcggcgatgcagggtgccttgggtggcgaccaccatctcctgcatgccgcggcaaatggcgaaaaggggaatgcgcctgtcgaacgcctggcggagcagcgccaggctcaacgcgtctcggccaggatcggcgtcaggctcatcgccgttttcaccataaaggtgcggctgcacattactggggctgcccggcagcaaaatgccgtcgaggcgtggcaacagttccgccagcatttccggctccgccagcgcgtgcggcagggcgatcggcaagccgccggcggtgataacggcattcaggtacttttcttgcaaggtctgtgtgaggtgcccgtttaacctatacctgcacatgacgacgccgatgactggtctgttaaatatattgtccatgctatccccttggtacgttcgaaattatgaacgataagcttctccaccgccgatttcgttcaatattctataaatctagcagtcgattgggcaatattcaaaccaaaagtaacacttgcaaaacaaatttgtttcatctacgtttcatttgtgggcattatattgaacaagacggtcaataaacatcgacgacagcaaaacacaaacggcgggtgaaccatgcagaccaacatcgtagaagtggaaaactttgttcagcacagtgaagagagacgaagtagcgcgttccagcgcgaagtgaagaagtatttggaacgttatccgttaacccaacatgtcgacgtcctgttgaccgatctgaacggcagcttccgcggtaaacgcatcccggtcggcggcctgaacaaactggagaagggctgttatttccctgcgtcggtatttgcgatggatattctcggcaacgtcgtagaagaggccgggctggggcaggagttgggcgagccggatcacgtgtgcgtgccggtgccgggcacgctgacgccgtcggcggcggatccgcaatatatcgcgcaggtgctgctcaccatgctggatgaagatggcactccctttgacgttgaaccgcgcaatgtgctgaaccgagtgtggcagcgtttgcgtcagcgcgggctttcccccgtggtagcggtagagttggagttctatctcatcgatcgtcaacgcgatgcggagggctatctgcagccgccttgcgcgccgggaacccaggagcgcaacacccaaagccaggtgtactccgtcgataacctgaaccatttcgccgatgtgctgagcgaaatcgacgagctggcccgtttgcagggcattccggcggacggcgcggtggcggaggcgtcgccggggcagttcgaagtcaacctgcaccataccgatgatgtgctgcaggcctgcgaccatgcgctggcgctgaaacggttggtgcgcatggtggccgagaaccacaacatgcaagccacctttatggccaagccgtatgaggagcacgccggcagcggcatgcacgtgcacatcagcatgctgaatgcgcaaggcgacaatgtgttcgccgacgacgacggcgaagattcggcgctgctgaaacaggcgttggcgggcatgatcgccctgatgccgtcctcgatggcgctgctggcgccgaacgtcaacgcctatcgccgtttccagcccggcatgtatgtgccgacccaggcttcctgggggcataacaaccgcaccgtggcgctgcgcattccctgcggcgatcgcgacaaccaccgcgtggagtatcgcgtggcgggcgccgacgccaacccttatctggtgatggcgaccattctggccggcatcgtctacggcctggaaaccgcattgccgctgcctgagccggtgaccggcaacgggctggagcaggacgggctgccgttcccaatccgccagagcgacgcgctgtacgagtttgaacatcagccggtgctcaatgcattgctgggcgaacgcttcagccatgtctacctggcctgcaaaaccgacgagctggtgcagttcgagcgtctgatcaccgaaaccgaaatcgagtggatgctgaaaaacgcctgatcccgctcacctaacgactaccgcgcgcgtccggcgcatttcatcggctctcctgtggccggtgaggctgcgcgctgcggtacagaatttcttctatcacggcgtacaggacgccgacgaggaaataaccatgactcagtcatccccatgcgcaggcgtctgcctgtgccgcagtgcctacgggccggtcgccggccgtccgacagtgaccccaaaccgtttttcccgccgcctgaacagcagtttccccgcggcctctctgaatgacgttgcacggttgacagcagaggaccaaaaggggaactgccatgacgactaaagccatcgacagcggcccggcgggcaaaccgcagctgcgcaaatccctcaagctgtggcaggtggtgatgatgggcctggcctatctgaccccgatgacagtgttcgacaccttcggcattgtctccggcctcaccgacggccatgtgccgacctcctatttgctggcgctggccggcgtgttgttcaccgccatcagctacggcaaactggtgcgccagtttcccaccgccggttccgcctacacctatgcgcagaaggcgatcaacccgcacgtcggttttctggtggggtggtcgtcgctgctggattatctgttcctgccgatgatcaacacgctgctggcgaagatttacctgaccgcgctgttcccggaagtgccgccctgggtgtgggtggtgggcttcgttatcctgatcaccgccatcaacctgaaaagcgtcaatctggtggccaacttcaataccctgttcgtgctggcgcaggtggcgatcattctggtatttatctacctggtggtgcgcggcctgcacaacggcgaggggatgggcacggtgtggagcctgcggccgttcctcagcgagaatgcccacctgctgccgatcattaccggcgcgactatcctgtgcttctcgttcctcggttttgacgcggtcaccacgctgtgcgaggagacgcccgacgccgccaaggttatcccgcgcgccatcttcctgactgcgctgtacggcggggtgatctttattagcgtttcgttctttatccagctgtttttcccgaccattcaacgctttcaccaacccgacgccgcgctgccggagatcgcgctgtacgtcggcggcaagctgttccagtcgatcttcctgtgcgtgacctttatcaacacgttggcctccggcctggcgtcgcacgccagcgtgtcgcgcctgctgtatgtgatggggcgtgacaacgtattcccggagaaattcttcggctatatccaccccaaatggcgcacgccggcgctgaacgtactgatggtcgggctggtggcgttgtcggcgctgtcgttcgatctggtgaccgctacggcgctgatcaactttggcgcgctggtggcctttaccttcgttaacctgtcggtgatcagccacttctttattcgcgaagggcgcaacaaaagctggaaggatcgcttcaacttcctgttcctgccgctggtgggtgcgttgacggtgggggtgctgtggctgaacctggagaagagctcgctgaccatggggcttatctgggcgacgctgggtttcggctatttggcctggctgacccgacgttttcgtcagccgccgccgcagttggagcggcaaccgcagcaataaattcacaggcgggagtttcccgcctttctttttggcgcgtgcggcagtagagtgaaaaaactgataaaaaataacctattggacctgccttatgcccgctttgcccttgcgtacccgcgccacgctgctcggtttgttggccatcgtgctgtggagcagcgtcgtcggcctgatccgcagcgtcagcgaagggctggggccgatcggcggcgcggcgatgatctacagcgtcagcgcggtgtttttgctggtggcgctcggcgtgccgaaatggcgcagctttccgcggccttatctcatcgtcggcagcctgctgttcgtcagttacgagatctgcctgtcgctgtcgctcggctacgccaatacccgcctgcaggcgatagaagtgggcatgatcaactacctgtggccctgtttcaccgtgctgatggcgttggcgcttaacggccaaagagcgaaatggttgctgctgccggggctgctgctgtcgctgttcggcatcggttggatcatgagcggcgagggcggctggtcgccggcgcagatgctggccaacgtgcgcagcaacccgctcagctacgcgctggccttcagcggtgcggtgatctgggcgctgtattgcaacctgaccaagaagatcgcccagggcagcaacggcgtggtgctgttcatcgtgctgaccgcgctggcgctgtggctgaagtacgccttcagcgcggaaagcggcatgcagttcagcctcggcgtgaccgtaacgctgctgtgcgccggggtggcgatgggggcggggtatgccgcctggaacgtcggcatcttgcacggcaacatgacgctgctggccaccgtctcctattttaccccggtgctgtcggcggtgttcgccgcgttggtgttgcacacctcgctgaccgtcaatttctggcagggcgtggcgatggtcactctcggttcgctgatctgttggcgggcaactcgcggaaattaacggaaattatccgctgtcgtcgcaatgttgaactagaatttaactagccatgttgcctgaaggaacgacgacgatgagaagcgacattcaatttattcaacagcctgaaatcgacgtgcatcactatgagcgcggcgataccgttcgcctgaccacggcgaatttgcgacatgaatatcagctcgacgtttatattttgcgtcgcgacgacaagctgatttacggctcggtcgtcgcggcggcgcccaagaccgatattccggtcgccagttgggaggtgaaaaacggtgaagaggtggcgttccgccaggaaaacatcgccaaagcggtgccggcggtgaactgatttcacgttccgtactttctcctgatgctgatgaaggccggcgctggcgcgtcggctttttcttttccacctcgtgatgacgccctgatgtcatttggctcaaaaactgcgctaaaaaacgcggtgcatgacaaaaatcacagcgaatgtgaatttgcatgaaacataatttgacaaatgtgaacgcaatcgattacctattcgcgaaatgcgtaactggatcacagattcttacagtcagtggtttctataatgcgcgcgtcatccgagtttctgtgtgaagacaacgccaggtgtcggcagactcattgtcatcttttctaaacgggcaggaaatggccctttaagcatgtggtaataaaatgaaaaaaatagctctcgcagcaggtgtactgctcgcagcgtcttacagtgcatcatcaatggctgatagcaaagacagtcaatatgtctccgactggtggcaccagagcgttaacgtggtgggcagctaccacacccgtttcgggccgcagctgaataacgatgtgtatctcgaatacgaagccttcgccaagaaagactggttcgatttctacggttacgttgacgtgccgaagttcttcggcgtaggcaacaccccggatcgcggtatctgggacaaaggctccccactgtttatggagattgaaccacgtttctccatcgacaaactgaccggcaccgatctgagcttcggtccgttcaaagagtggtacttcgccaacaactacatctatgatctgggccacaacgccgacggccgtcaaaacacctggtacatgggtctgggcaccgatatcgacaccggcctgccgatgagcctgtcgatgaacatctatgccaaataccagtgggaaaactaccaggctgccaacgagaacagctgggacggttaccgcttcaaggtgaaatacttcgtaccgctgacccaggtgtggggcggcaacctgagctacatcggcttcaccaacttcgacttcggttccgatctgggcaaggacagtggtaacgcgatcaacggcaaacaggtgcgcaccggcaactctatcgcctccagccatattttggcgctgaactacgatcactggcactattctttcgtggcgcgttatttccataacggcggtcagtggcaggatggcgcggatatcggcaccccgcagggcccgatcaagtctaccggttggggttattacctcgtggtcggctataacttctgattttccgtgctatcagaaacagaaaaccccgcttggcggggttttttttcgtcatcactgggcttgttcaaccgggagatgcttcaccggcataaacagtctgcctttgatcacgtgacattcattatttatccaactaatgatttgttcacggctgacgccttccgactgcgcgtactgatgaagatcgccgttaaagtgccgagtgatgtattccatgagggtcatttgcacgtcttttgctcctgaacgcccacccgttgccagcctggccaccgcgggaggttgaggtttctcagacagcgaatgtaaattatcggcaacgaaatctcaacataaagcaccagattggggcgacagcggcgggaaaaagaatcccgcacggagaggcgggaaatgttcgctattatcattatggatgataagaataagatttgaggtgcgacgaaaaagagcacgctaactcttttttgttaccttcccacgctagcgtaaggcttatttttcttcaagaaaaatctgagacaagcatcggcattttcgaggcgttttgcgttaaaacaagagagtggcgcgaatgccgtaaaaccgcactgtcatctcggagttttccttatactttgtctggaaaaggccagctatagtcaacagagtcacccacgcaggaatacacaacatgaacaaacgtcgtacgactctcacggtgttggcgctgattgcatcgctggggttgtcatccgccccggccttggccgacaaaggcggcaatggtaacggcaacggaaacggccatggcaacagcggcaatcacggcaataacggtaaccatggcaacaacggtaacaacggcaatcacggcaacaaaggcaataaagataaaggcggctataggaacgacgataatctggtatccgtcagcctctcgcgcgaccgcgcccgttcgctggcgcacaactatggcctgaccggctacagctcgctgccaccgggcatcgccaaaaatctggcgcgcggtaaaccgctgccgccgggcatcgccaaaaaagtggtgccttactcgatgctgcgtgagttgccgcagtacccgggttatgagtggcgtatcgccggcgacgatctggtgctggtcgcactcagcaccgcgattgtggcctccgtgatcaatggcgttttcgactaacgtttgtcgagcgttatcgggcctcgctgcggcggggcctttttatttgccagcgcggggcggacgtggtgaactttgggccttacgttttcactgcatcataagggaggcgccatgttcagggcgttattgatagcctgctgtttgaccagttttcccgcgttggcgggcggcggcgccgccatcggcgagctggtgaaccaacggctgtcgttgatgaaagacgttgccggttacaaggcgcagcagcatttaccgatcgaagatctggcgcaggaggcgaaggtgttggccagcgcgcaggcggaggcggggcgtttggggctggagccggcgtcggtacggccttttatcgccgcgcagatggacgccgccaaggcgattcagtaccgctatcgcgccgactggttggcgagcccggaaagcgattggcagccacgcccgctggcgcaggtgcgcccgcagatcgcgcaactgagcagccagatattgcaacggttggcggagcggctgcgtgccggcccgctcggcgaggcggatcgggcggcgtttatggcgtcggtggatcaggtgaatctcagcgccgccgacaaacggcggctggcggatacgctgctggcggtcaaaaccggcagcgcacgctgagcgtcagtcgcggccgacggtgctgcgtcggaaggtcagcatccggctgcggttggcgatgagatccacgttgtaaccgcggaaatagaggcaaaagcgttttaaccacgggccgtcctggcactccaccagcatgcggccctggccgagcgggctgagcgtgccggtctgcgccgccgggccgacgccgatatgcacccgattgccgcgaatttcaaaggcggtgcgatagtgcgggtgataccacagcccctgcacatgcttcaggcagtcgccgttggccgtgaccggcaggaaacggcgcgccacatgcccgacttcgccctcgatcgcttcaccggtccatttcaatttgatcggcatatgggcagacagcgacaccgcgtacccatcctcgccctgatacagcggctcaccgctgcccagataggccagattgccgtctttgacctccagccagtgcggctccgccagggtggcgtagaggccgtcggggatcgcggcgctgcgctgcggcaacggttcgcccagcagcgtcgccatcacctgtaagaccatgccgaagctgtcgcagtcttcgcggttggccaccagcgcgacgccggcctgacggtcgggcgccagcaggaaataggttttgtaaccggcgtgggaaccgccgtggccgagcaagcggcggcggcccagcggggtttgcgccagccccaggccataggcgctgagctggccctgattgaggcggcgcggtgcgccgagttgcgccagcacgccttggccggggccctcgtcggccagcagcgtctgcaaccagcgggtgagggcgttgaggctgccggtcaggctgccggaggcggaaaggtgcaggccggcgctggcgtgttgccagccctgtggcgcacgccagtaacccggcaccaaccccggcactacgtcgaaccagctttccggcgcccgcatctgcacctgcagcggccgggcgatgtgctgttgcaccagttggtcgaaatcataccctttgctgcgcagcgcggcctccagcagccgatagccggtattgctgtaggcgatctcgctgccggcttcgtagttcaatttctccagcccctcgacgaactgcatcaccggctgcgcctcgctgacggcgtgcagcgagatgcccagcaggccgagcgtctcgcgcacgtcgggcaggccgccggtcatgtccagcgcctggccgacggtaacgtccgccaacgcgggctgcagggcggggagcagttcacccaggcgttgctccagccgaatggcgcgctcggtggcgttcagcgccagcgcggcgaagatatgcttggtcactgaggcataacgcaccacgctgtcggcggtgaagggggtgttctgcgccagatcggccaggccggcgcaggcggtggcgcggcgttgttgggcgtcaaacagggtgatggcgccgccgggttcgccatgccgttgccagccggccagcagttgttcggccaaggcgccggcagcgcgccagtttaacggtgttacagacatagggcctccagagagtattcgaaatgggcctgctcggccacacgccgcccggcgctgagcgcgggcttttgggctgattgtggcgcagtgcgtttttcgtcggccgccgttttgtgcgctgtttggaccagctagcggggaatcacgcgaaactttgatatagcgcgcagattgctgctggcgttacggttagaggcaggaggaaaacaggcgcccggcggcgcctgtaaagggggatcaattcagtctggcggcaccgtccaacaggctttcaatcatctgcttgagcaggcgctgcagcgaggcggcgcgctggggctcgaacgcaaaaggatactgttcggacatgtagttgacctgcgccagttcgagctggatcgcatgctgttgctgctgcggttgaccataggcgcgggtgatataaccgcccttgaagcggccattcagcacgtgggtgtactgctgttgctgctcgcagcaggcgaccagccgatcgctcagcgcctgggcgcagctttcaccgccgttggtgccgagattgagatccggcagctggccgtcgaacagccgcgggatcaccgaggcgatcgagtgcgcgtcgaacagcagcgcatagccgtggcgcgctttgaggcgcgccagttcgttctgcagctgctgatgataaggttgccaaatttgctgcaggtagagggcgcgttcttcgtccgtcggcgctttgcccggcaggaagcttgggcggccgtcgaacagcacgtcgggatacaggccggtggtggcggtggtgtacagcggcttatcgtccgccgggcggttcaaatcgatgacgaagcgcgaatagttgccgaccagtacgctggcgcccatcgcccgggcgaagtcgtacagctgcggaatgtgccagtcggtatcgggcagcgggcgagcgtcgtcggtcagcccggcttcgaccgccggcgtcagttgtgtgccggcgtgcgggatgctgatcagcagcggcaggctgccggtctggaagctaaaaggatcgcgaatggtcattgacgtacttctcctcggaaaatcaccgtacagggcagctggccgcccaaccaataagccagttccgccggccgcgacagcggccagtgaacgaagtccgccaccttgccggtttccagcgtgccgtggctgtgttgcagccccagcgctttggcggcgtgggtggtgacgcccgcgagcgcttcttccggcgtcaggcggaacagcgtgcaggccatgttgatcatcaggcgcagcgacagtgccggcgacgtgccggggttggcgtcgctggcgatcgccatcgccacgtggtgtttgcggaacagctctaccggcgggcattgggtttcacgcagcaggtagtaagcgcccggcagcagcaccgccacggtgccggcgttgcccatggcgcgggcgtcttgctcggtagcgtattcgagatggtcggcggagagcgcgtgatggcgcgccgccagcgtgctgccgccgagggcggagagctgttcggcgtgcagtttgaccggcagaccggcggcttcggcggcggcgaagacgcgctccacctgcgccggtgagaacgccagatgctcgcagaaggcgtcgaccgcatccgccagaccggcggccgccgcctgcgggatgatggtgtcgcagaccagattgatgtagtcgtcggcgcggttggcgtattccggcggcagcgcatgggccgccagacaggtggttttcacctcgaccggcagcagctcgcccaacttgcgcgccacccgcagcattttcagttcgctctccgggctgaggccatagccggatttgatctccacgcaggtgacgccttccgccagcagcggccgcaggcggaacagcgcctgctccagcagcaacgcttcgtcggcctcgcgggtggctttcacggtggagatgatgccgccgccctgcgcggcgatgtcggcgtagcttacgccgttcagccgctgttcgaactcgccgctgcgattgccgccgaacaccaggtgcgtgtggcagtcgacaaagccgggggtgatgatgccgccgtcgaatttcaccgtttcgtccgcgataagatcgggcggcagcgccgcatgttcgccaatccagacaatcttgccgtcgcgtacggcgatcgcgccgtcggtcagggtgtgatatttaccgtcgcgcatggtgacgatatcggcgccgtgccacaggctgtcacagtggatctcagacgtcattgctttcctccgccggagccgcagctcccacatggttgtatatacaattaaaaataacctaacgcattcaccgggatgtcacaagaggcgggcgagattttgttatcaggatgtgatcgacagcggagatgcgggcgcagggcgcgcccgccggggttcagacttcgctggtgaagcggccgaacagctgatagcggctgccggggtacagcaaccgcgccgaggtcaccacggttttgccggaccaggtgcggcgatggatcagcaggccgggttcgtgatcctccagctgcagcagctcgcgctcccgccgggtggggatcaccgcttcgacgatgtgttcgccggcggtcagcggcgcggcctgcgtcaggtaggtgtaaggggtgacgcggtcgaaatcctgcttcaggtaatccggcgccactagcgggttgacgcagcggtcttccacctgcaccggcacgtcgttttcgtaatgcacgatctgggagtagaacagccgttggccgggctgaatgcccagcgccgtcgcttcttcctcgctggccgggcgggccttcagctcgaggattttactgctgtggcgatggccgcgcgcggcgatctcatcggcgatgttgtgcacttccagcagtgcggtatgcgccttggcttcggcgacgaaggtgccgacgccctgcatgcggatcaaaaaaccttcgctggtcagctcgcgcagcgcgcggttgatggtcatgcggctgacgcccagttccgccaccagttcactttcggagggcacgcgctggtgcggttgccaatgccccgcacggatttgattcacgatcgcctgtttgacccgttggtagatcggggcgggggcatcgctcattgcagctgccagttgtaacacggtctgttgttcagccacgacgttaacctcgtcaaataaaaaaataataacaccagtttactgttgatgtcggcgtatgtatatgtatatacaactagtggccgtcgcgccagaaacttgccggcggccgccaaaaaattcctgaatgcgcgccatcgccgcgcctcattcaccgttacatcaaccgtggaatactgccatgcctgcttattttgccccacgcgctttgctccctgagggctgggcgcataacgtccggctggacgtcgatgcgcaaggttacctgactcaagttaccgccgacgctgaaccgcaaggctgcacccggctgcacggcgacgcggtgccgggcatgccgaacctgcactcccacgctttccagcgcgcgatggcggggctggcggaagtggcgggcaacccgcaggacagtttctggacctggcgcgatctgatgtaccgcctggtgcagcgtctgacgccggagcaggtggaggtggtcgcccgtcaactgtatatcgaaatgctcaagggcggatacacccaggtggccgaattccactacctgcatcacgacgccgacggcaagccttacgccgatcgcggtgagatgaccggccggctcagcgaggcggcgcatcaggccggcatcggcatgacgatgctgccggtgctgtacagcttcgccggtttcggcgcgcagccggcccagccggggcagaaacggtttatccaggacaccgaaagctatctgcaccagcagcaggtgattgcccgccagctggcggatcgtccgttgcagaatcaggggttgtgtttccactcgctgcgtgcggtggagctggggcagatgcagcagattttggccgcgtcggatcgcaccttgccggtgcatattcatatcgccgagcagcaaaaagaggtgaacgattgcctggcgtggagcgggcagcgcccggtggcctggctgtatgaccatctgccggtggatcagcgctggtgtctggtgcacgccacccatctggatcgcgacgagctggaagcgctggcgcgcagccgcgcggtggccggcctgtgtctgaccaccgaagccaacctcggcgacggtattttccccggcgacgcgtacctgcagcagcaggggcgctggggcatcggttccgacagccacgtttcgctcaacgtggtggaagagctgcgctggtttgaatacggccagcggctgcgcgatcagcgtcgcaatcgcctgacgacgccggaacagtcggcggtgggcgatgtgctgtactcgcaggcgctgcagggcggcgcgcaggcatgcggcgcgccgatcggtcggctgcagagcggctatcgcgccgactggctggtgctggacggcgacgatccgtatctggcggcggcgccggacgcctcgatccttaaccgctggctgttcgccggcggcaaagagcaaattcgcgacgtattcgtcggcggccagcaggtgatcgagcagggacggcacgcgctgcagcagcagagcagcgccgagttcctgcaggtgctgaaaacctttcagcaggaggcgtaatgggcctgacccgttttaactttgccgcgctgccggtcagcccgtggcgcaacggcggtggggaaacccgtgaaatcgtcagctggccgccgggcgcgcaggattttgactggcgtgccagcatcgccaccatcgcgcaggacgggccgttttccgcctttgcgggcatcgatcgctcgatcaccctgctggaaggcgacggcgtgcggctgttcagcgctgggcatatcgaccatcagttggcgcgcgtcggggagccgttcgcgttttccggcgacgtggcgctggaagcgacgctgctgggcggcgccagtcaggatttcaacatcatgacgcgccgcggccggcaggcggccgaggtgcggcgcagcacggcgcccgtcaccctgctacccaaccgggcgggcgtgctgtatgtgctgagcggggtctggtcgctgccggagggcggcgagctgcgggcgcgcgaaggcgtctggtggacggcgcaggcggtgagcggtgaggtgaagccgctgacggccgacggcgctattctgtgggcggacatcacagcctgctaacgcggagtagagtcctgcgcctggttatgggattattcacttttcctcattaatcataaagaagggcgcatggcttcgctgaaagacgtcgcaaaacttgccggagtctcgttgatgacggtgtcccgcgccatcaatgagcccggcaagctgcggccggaaacctatcggcgcgtcaaacaggctatcgaccagttggactatgtgccggatctgtcggcgcggcgtattcgtggtgacggaaatcgcgtacagacgctcggcgtgctggcgctggacaccgccacgacgccgttctcggtggacatgatcctgtcgattgaaaaaaccgcgcgcgagcacggctggaacagcttcgtcgtcaatctgtttgccgacgacaacgccgaacagaccgtcgatctgctgctggcgcatcgcccggacggcgtgatcttcaccaccatggggctgcgtcaggtggatgtgccggccaaactgctggacaaaaggctggtgctggccaactgcgtcagcccggcgcatgcgatcgccagctacattcctgatgacgagcaaggccagtatgacgcgatgcgcacgctgatcgccaaaggctatcgttcgccgctgtgcatacatttaccggcggatacgctggcggcggggctgcgccgccgcggtctggagcgcgcctggcgcgatgcagggcgcgatgttgaacagctgcggcagtatcatctcgatctgagcggcggcgatcaaggctatcgcgactgcgtcgcgctgctggcgcggcatttctctgccggccggcgcgattgcgatgtcgtggtatgcgggaacgatcggatagcctttctggtgtatcaggtattgctggcgcaaggatggcggataccgcaacaggtggcggtgctgggctacgacaacatggttggcatcggcgagctgttcctgccggcgttgacgacggtgcaattgccgcactacgagctgggccgccttgcggcgctgcatgtgatcgagcagcgggaacagcgtgatacggtgaaagtgccttgcccgctgttggcgcgtggttcgctgtaaccgcaccgggtgcgtcgctgcgcgcccggtgctcattcccactatccccagatgctagccagctgccatcctgtgatgggctcgaactctgcccgtccgccctcggcaaacaggctgaggcggcgatctccctccgtcggataaatgcggctggtcaggcaggccaatccctgattaacgaaaatctccagcgatgaacggtcgataaagatccgcagcgacaggatgtcaccctccggcagcggcacgctgcggcaggtgctcagggcggggttttcatgaaaacgttccagtaccagtcggtgcgcctgattatcgacgaacagccgcgctacactcccgatggccagcccgtaacgctcggcgtcgttgtcggccggtctcaatgtcagagtgagttcctgcacatcgttcgccagcggcaaatgctgattggtcagcgtctgcgccaaaaacgagtgcgacgctcggcgcagcgccgccagttcacgcgccgggttcatgcggacgctgccgtcggcggccagcgtcagctcgcgcggcagggtgagggcgccggcccaacggtgcgctttgctgggcatcggtgattcccacatatccatccaggcaaacagcagccgacggccgtcggcggcggtgaaggtctgcggcgcatagaaatcgtggccggcatccagctcgcagaagggctgggtcaccctgaagtcgccgtccggccgccaatggccgagcagatagccgctctggaagcgattgcggtagcggtagccctgcgccgccaggccctgcggcgagaacagcagcaggtgctgttcccccagcgggaagaaatccgggcattcccacatatacccttgatgcgccgtttgcgcgccgaccagcacccgatcgaagcgccaggcgcgcaggtctgcagaacggtacaggcgtacctggcccaggccgttttctttagcgccgaccaccagccaccattcgccgttctcgcgccagactttcggatcgcggaaatgctgaatgccgtccggcggggccagcaccggcccgtgcttgacgaagcgtatgccgtcttcgctggtggccagacattgcacttcccgcacctggctgtcgtcgccgggctcgcccagccacacgtggccggtgtaaatcagcgtcagcacgccgttgtcatccacggcgcagccggaaaagcaaccgtcttggtcatagggcgcatcgggtgccagggcgatgggctggtgctgccagcggatcagatcgcggctggtcgcgtgcccccagtgcatgggcccccagtgttcgctataggggtgatgctggaagaaggcatgatagacgccgtcaatacagatcaggccgttgggatcgttgatccagccggcgggcggcgcgagatggaactgcgggtagtaatcatctcggcgctctgcgcgcagggcctcgaccgcatggtcggcttgagctaaggcagtgttcattggacagactcacttgatttaatggcggatggaaagggcgctgccgtggcggaacgttcgccgcgcagcaggaaacaggaaacaagcgtcgtggcggcgaccgcgcagcccatcagcagataggtgtcggcaaagccgatgcggtcataaccgtagcccgccagcggcgacaggaagctggccatcacttgggtgatgaattgaaagcccaccaggtacagcgtggaggagaggcggctgtcgaagcggctggcgatgtatttgaagatagcgatcagcaggatcggcaactctacggcgtgcagcagtttcatggcggagatcatcaaggcgccgctgaccaagccggagccgaacatgcgcagcgccatcacgctgcccgccagcaacagcccctgcttggcgccgatgcggttcaccaacagcggagccagaaacataccgccggcttcgaggaagacctgcagcgagttgagaaaaccgtacatctcgttgccctgttcgcgtgacgcgaactgtgaggcgaagtagaccgaaaattgctgatcgaaaacgttgtatacgctgatgccgagcacaaacaccaccaacgcccagaagcccggcatgcgcagcagcgccagcgcgtcctgcagccgcaggttctccggtttgccaaacgccaggccggccatggcgttcggcttcagctcgcgcacctggctgagcagcaccaggaacaccacggcggcggcggaggccagccagaaattgatgttcggatcgatattgaagataaaaccggccagaaaggtggcgctggcccagccgagcgagccccacatgcgggcgcggccgaattcgaaaccgctgatgcggctgacgcgctcggtataagattccagcgcgccgatgccggcgaagaaagtggcaccgatgaacagcccgccgaccaacgcacccagcggcaggctgctcgccagcagcggggcgtaaacgtagataaagaacgggccggtcagcagcagcatcacgccgagaaactgcagcaggtgcttgcgcagcccaagtttgtcctgaataaacccgtacagcggctgtgcgcacagcgccaccagcgagatagcggagaagatcaggccggtctcggcgcctttaagaccgatcttctgattcagccagagtgagatcagtgaaaagctggaagaccaggtgaagaaaaagaagaacagcaggccgctgagcagcacgtaatattttttcgtttcgcggttcatggataaggtcccggtgagtgaaatcagctttattgttaacgttaactcgcgaagggatgaagctgtccgatatcacacatgcgatgttaatcacaaaagttaacgttaacattattgatttgtgatgtttctcacgcagagacgcggattaacgagcgtggttacgcatcctgcggggggacatgaaacggcggcgattggctggcggccgcaaagcgggcgatcaagaaatccaacagcaggcgcacgcgcggcggctgatagggcgagcggcgaaacacggcgtagatcccggcttcatgcggggtgaagtcgggaagaatgacgttcagacgcccgctgcggatatcgtccgccgcatcccagatggttttacgcgcgatgccgtgccccgctaaagcccactggcgtgccagcgcgccgtcattggtctcccaggcgctctccagcggcaccgtgtggctccaggcctggccgtccagggagaaatggaacgtattcagcgggccggctgcggtcaccagtacgataaaacgatggccggtgagatcggccggcgtgcgcggctcgccatattgcgccagatacgccggagaggcgcacagcacgcgtcggctggcggccaggcgccgcgcgatgagcgtttcttcgcgcggcgcgccgaaacgaatggcgatatccagatcgtcctgcagcaggttggatagggagtccgacagtgtcagcgcgatctgcagccgggggtgttcggcgcaaaattcttcaatccactgattgagaaggttgcgcccgaaatcggcggaggccgagaggcgaagtttaccgcacacgccgctttggctggcctgcagagccgcctcgccgtcggcaatcgcctgcaacgcgagggtgcagtgttgcagataaatgcgcccttcttcagtgagacgcaggcggcgagtggtgcgatcgaagagtttactgtgcagcgccgcttccagcttgaacaaccgcgcgctggcggcggcgggggaaaggccgagtttacggccggcggcagaaaggctgcccgataccgccgcttcggcaaataaacgcatgtcacccagtctgtccgttgccatttttatcaatctggatttgaaaataattcaaatggtaggccaattatcaatccgtatgcaaggtgagacgctgatgactctgcaattgaccatgggagttgttggtaatgaatgttcactctgtttccaccgatagcgataatgcgcatggcgcgctgccgccgctgaaagcattgctggcgctgacgatgagcagcttcatcgcgaccgctaatgagactgtgccggccggcatgctgccgcagatagcccgaggcatgagcatcagcgaggcgtgggcggggcaaatggtgacgttgtgcgcgctgggcgccggggcggcggcgatcccgctgacgttagcgctgggcgggtggccgcgtcgccgactgctgctgttggcgatcggcatctttttgatctgcaacgcggtgacggcgttgtcaccctgttttggcgtgacgctgggggcgcgctttttggtcggcatcgctaccggggtgacgtggagtctgctcgcgggttacgcgcgccgcctggccatcgtctcattgcaagggcgggcgatggcgatcgccatgctggggatcccgctggcgttggcgttgggcgtaccgatgagcgcctggcttggcgaactgttggattggcgctggatttttgccgtgctggcgagcttgagcgcgttgctgctagtgtggatccggctgacgctgcccgaattttacggtcgccgaacgccaggcaatgcgcgtttgcgcgaggttttctgtcttcccggcgtgcggccgatccttgccgtattggcgtgttggatcctggctcattacacgctgtatacctatcttgcgccctatcttgccgcgcgcggcctggcggccagggtggatttggcgctgttggcgttcggcatcgccgccgttgcgggcattgcgctgaccggcttatgggtggatcgctggctgcgtgcgctggtgctgttcagcctggcgggcttcgcgctggtggcgctggcgtttggcgtgaacggtttgcccgtcggggcggtttacgttggcatggcggcatggggattgagtttcggcggtgcgccaacgctgttgcagacatcactggcggatgcagcgggtgagcatgccgatctcgcccagtcgctgctggtcactttctttaatctggcttttgccgtcagcggcgcgttgggcggaattctgctggcaaacgtcggcgctaacgccatcccgtggatggcttttgtcctgttgctggtggggtggagcattgcctggggcagtgcaaagcgcggcttcagcgccgaacgccgcgccgcggcgcgctgagggggcggcgtcgccccctgtagcgagattaacgttcgttcagcgaacgcaggtgatcgtcacggcgcagcgtcatcagcgcaaacaggctgaccaccgacgtggcgaccacgtagtaggcgggaatatcgatattgccggtctgtttgatgaggccggtgataatcaacccggcagagccggaaaacaccgcattggaaagtgagtaagccagccccaaaccggtataacgcacccgggtcgggaacatctccgccagcatcgccgggccgggaccggccagtaggccgactacggcgccggcgatcagcaccgccagccctttgacccacagtgaactctgcgcatcctgcaacaggtgcagcagcggaaaggtgaacaggatcaccgccgtcaccgccgtcagcatcaccgtttttcgtcccagcctgtcgctgatgatgcccgccggcagaatggtcagggcgaaaccgacgttggccagcaccgtcgccaccagcgcctgttggaaggtggcgtgcagcgaggtttgcaaataggaaggcatcaccaccaggaaggtataaccggcggccgaccaacccatcatgcggccgatgccgatcagaatggttttcaccacgccgcccagcttcgcttccggcggtggggcggcgtgttccgcacgttgctgcgcctgggtgaacgtgggcgtttcctcgagcttgagccgcagccacagcgccacggcgcccatcggcagcgccagcaggaagggaatacgccagccccagtcatgcaactgctgagcgctgagcagcgcggccagcagcgccaccagtccggcgccggccagcaggccgagcgcgacggtcagcgattgccaggcgccgaacagcccgcgcttgcccttgggagcaaactcggtcatcagcgataccgcgccgccgaattcgccgccggcgaacaacccctgaaacatgcgcagcagcgtcagcagcagcggggcggcgacgccgatcgaggcgtaggtcggcatgacgccgatcagcgcggtggccagcgtcatcagcagcagaaccgcaatcagcgtcggccggcggccgatgcgatcgccgatgcggccgaagatcaccgcgccgatcggtcggcagaaaaacgccagcgcaaaggcggcgtaggtgaggatcaggctggtgatttcattttcaccctgcagggtgaaaaaattggcggcgataacggtggccaggaacccgtatacgccgaactcataccattcgataaagttgccgaccgagccggccagcaacgcctgacgcgagcggcgcgcgtctagagtctgttgagtcatccccgttcccatacatttgaattattgttcgtcagttctaaatttatacgacaaaacaatcaattgatttcagcgggaactgtgaggcgcgattcaccagagcaacggcgccggctcacggccattttcggcgtagtacagcgacggcaggaactgcgctagatagctgaactcgttgtagcagtggcgcatcaggttaaacccgatatcgtccgccagttcgtcgtgggcgttggcgcaggctttacccagcaggaagcggctgcgcagcacgcacccatagggcgtatcacgtaccagatgcagcatctcgccgtcacagggatcgccgttgtcatccaacgccacctggtcgccgaagccgatgcgcgcgcacacggcggcggagagcgcctgcgcatcgcgcgcctggcgcagcggctgcggtgcgaagaagtcctcggcggcgtgaaacttgaggcgcgccgcaaccggcggcagctccgccagccattcgaccgcttcgatgctggcgccgacgtagctttccccttttttccaatggcggtcccagccgcgatgttcgacgtgatcgtgcgggtgccaccagttgatgtgctgggtgttctcgaagaaggtgaaccaccagtccagcatgcgccctttacaaccgtgcagatcggttcgaaccgctacggtgagcaggccgtcggcgctgcggctcagccccatttccagccgcagcggctcgggcctgagcaactcgttgatatcgttgacgccccagggcgccagcagggaaggatgtgtcataatgggttcctgttttattttggaaacgaaatgcgtttcaaaaataaagctatgccgttatgctgagtctgtcaacgcttgtgaggaacaattatggcgaacccgaatgaagaaccgctgcgcgctcgcggccggccggccacgccggaaacggcgctgcgcgccgcgctgacgcaggcgacgctggcgctgctgctcgacggcggatacgccgcggcaacggtggatgcggtggcgaaacgcgccggggtagctaaaaaaaccctgtatcgctttgccgccaatcgtgatgagctggtggcgcaggcggtgagcggctggaccgaggcgtttcagccagccttcgcacaggatgccgggcggcgggaggcggttgcgccgctgttggaaacgggactgaaggcggtggcgcagcaggtgctgagcgccgaagcggtgggcatgtttcggctgctgcagagcgatttcccggggcgtgaggcgctgctggacagctaccagcgcaacggcattcagcgcgggcgagcgacggtggcggattggctgcggcgccagcagcaatacggctggttgcttgcgcgcgactgggcgcaaaccagcgacctgctgctggcgatgaccatcgccgaaccgttgcgccagatgacgttggggctgctgccgccgggcagcgcgatcgacgaacgcatcgcggcggcggtggcgctggtgatgccggggttgctgcgcggcgaaaacgcggattgcgccgcattgtgagccgcattcatctgtggcatgttaattgttcaatttatgtcactattttgcgatgcccccatgaatgctgcttacccgttcaaacagggcgatctgttcgccttgaccgtttttctggccgtcgccacccatcgcagctttcacgcggcggcggtggagctggaggtgacgccgtcggcggtcagccactcgataaaaaacctggaacagcggcttggggtgaggctgttcaaccgcaccacgcgcagcgtggcgccgaccgaagcgggtgagcgtttggcggcgcagctgcgcccggcgctgtcgtctatttcgcaggcgctgcatgaagtggatgaatggcgcgccacgccgagcggcaccgtgcgcatcaacgccagcgaaggggcagtcaggctggtattgcgtccgttgctggctgattttctgcgcgagtacccccatatccacctggatatcgtctgcgacggcaagttgagcgatatcgtcgccgaggggtttgatgccggcattcggctggcggaagccgtaccgcaggacatgatcgcgatgcgcgtcagcccgcccgtgcgtttcgccgccatcgccgcgcccggctatttcgccgtccatgggcgcccggcgacgccgcaggatttgctgcgtcataactgcatccgctttcgcttcgacagcggcacgatttaccgctgggaattcgaacgtgatggcgtgagcgagtcgatcggcgttaccggctcgctgacgctgaccgatcagcctctgatggtggacgccgccatcgacggtatcggcatcgctttcgttcctgaacatttggcgctggaagcgctgcacgacgggcgcctggagcgcgcgctggacgcgtggtgtccggcttatccggggctgtgcctctattactccggccatcgccacgtgtcgggcgcgctgaaggcgttgatcgagtatctgcgcgcggcgcggtcctgatgcgttcgcgttctgcttttggctacgccaattagtgagccgccttcatctccacagtgaggttcgcctgcattgttgcggcgtggagcctgccttacgctcatgaggagacgccgggcaaccgccgggcgccaccctgctgcgaggagttgatgatggataagaagatgaaagcggtagttatgaccggcgccaaccggccctgggaaatcagacaggtgccgatgccccgcacagagccgggccaggttctggtcaaagtgcacgcctcgggcatgtgttataccgacgtatgggcgacgcaaggatatggcggcgatatttatccgcaaacgcccggccatgaagtggtgggggaagtggttgaggtgggggccggcgtgcatacgcggcagattggcgatcgcgtcggcaccacctgggtgcaatcggcctgcggccgctgcccgtactgccgcgagaatcggccgctaaccgggcaaacggcgatgaactgcccggcgccgcgcaccaccggttttgccgcccagggcggccacgccgagtatatcgccatcgccgctgaaggcacggtgttgctgccggacgggctgtcttacatcgacgccgcgccgatgatgtgtgcggggtataccacctggagcggcctgcgcgacgcggcgccgctgccgcatgagacggtggcggtgttaggcattggcgggctggggcacgtcgcgttgcaactgtcgaaagcctgcggtttcgataccgttgccatcacccattcgccggacaagcacgcgctggcgaagcaactgggcgccgatcgcatcgtcgcctccgggcaggctctgcgggagaacggcggcgcggacattctgctggtgaccaccaatgacttcgactccgcgcaggaggcgatgagcggcttgcgggtagatggccgcgtggtgctgtgcgggctggacttcagtaaaccgttcgcgatctcttcggaaggggtgccgttccatatgatgcgtcagcgggtgatcggatcgacccacggtgggcagcactacctgagtgaggtgctgaacctggcggcgaaaggcaaagtgaagccgatggtcgagactttcacgctggatcaagccacggaggcttatgagcggcttgcctctggcaacatgcgttttcgcggcgttttcgtgccgtcggcggcgtgagaaaagggccgagggttcggcccttgcagacaggtatgaagggcgctgcggcgccctggttgctttacagcttaggcccggccttcaccaacttttcgcccgccggggtgacggtatatttggcgaagttgtcgataaagcgctgcgccagatcctgcgccttctcctgccacagcgattcgtcggcgtaggttttgcgcggatcgaggatcgacggatcgacgcccggcagtgcggtcggcacgttcagcccgaagatcggcagcgtgaaggtctcggcctgctcaatgtcgccattcaagatggcgtcgatgatgccgcgcgtatctttgatcgagatacgcttgccgctgccgttccagccggtgttcaccaggtaagcctgggcgccggcggcctccatgcgtttcaccagcacttcggcgtactgcgtcgggtgcagcgtcaggaacgcggcgccgaagcaggcggagaaggtcggcgtcggcgcggtgatgccgcgttcggtgccggccagcttggcggtgaagccggacaggaagtggtattgagtctgctccggcgtcaggcgcgataccggtggcagcacgccgaaggcgtcggcggtcaggaagatgattttgcgcgcgtggccggctttggacaccggcttgacgatgttctcgatgtgataaatcgggtaagagacgcgggtgttctcggttttgctggcgtcgtcgaagtcgatgctgccgtcggccagcacggtgacgttttcgagcagcgcatcgcggcggatcgcctgatagatttccggctccgcctgcggcgacagcttgatggttttggcgtagcagccgccttcgaagttgaacacgccgtcgtcgtcccagccgtgctcgtcatcgccgatcagctgacgcttaggatcggtggagagggtggttttgccggtgccggacaggccgaagaataccgccacgtcgccttgctcgccgacgttggccgagcagtgcatcgacgcgatgccctgcagcggcagcagatagttcatgatcgagaacaggcctttcttcatttcgccgccgtaccaggtgccgccgatcagctgcatgcgctcgctcagattgaaggcgacgaagttctccgagtgcagcccttgctgctgccagtccgggttggtgcatttggcgccgttcatcaccacgaagtccggctcgaagtcagccagctcttcgtcgctcgggcggataaacatgtttttcacgaagtgcgcctgccaggccacctcggtgatgaagcgcactttcagacgcgtgtcggcgttggcgccgcagaacgcgtccaccacgaacagacgcttgccggagagctgattgcccaccagcgtcttcagatgctgccagacttccggcgagagcggctggttgtcgttcttgccggtgccgttgtccgaccaccagacggtatcgcgcgtggtgtcgtcgcgcacgatgtatttgtccttcggcgaacggccggtaaattcaccggtcgcgacgttgaccgcgcccagttgggtgagggtgccgcgctccagcggcggcaggtcggcgcgggtctcttcggcgaacagcaattcataactggggttatagacgatgtcggcggcctgatggatgccgtagcgagcgagggtttgtggggtaacagcgcgtgaagacatattctacttccttatgagtcatattatgcctctttcccgtgcggtgccgcgcgcaggattgagattcggatcaagctgaccggattcagctaatgcgtttccggttctttattaataaaacagggggctttttcgccctcctatagcatagcagcgaatttaagcctgcttactttaattacaaaatgctgacgataattaattaaaaccaaccttggcggagggtcacaatattgaatttcgccggcgtaatttagttttgcatttttattttttatcatattgtcagggctgtctactgttttatttcttattagaaaaagcgaaatccacaatgggatttttcgtaatcatttgtttttgcttggctatggcagagtttttgcgccaggtgaatctaaccgtactgtacgcttgtcagcagggtgaataatgaaacagataaatgcagaactggcctgtgataaaaatacggcatcgtccgaatcctcagggttaattaatcaacttcgtcaaatggatatcggcgcggtaccgatcgccttgtttatcacgatttgcgcgatcgtagcgatttccgcctacgccaacttcctgccgaagaatatgatcggcggcctggcggtgataatgacgctgggctttgcgctggcgcagttgggaaaaagtattcccgtgctgcgcgatatcggcgggccggccattctgtgtttgatggtgccgtcggtgctggtctatttcaatgtcttccagcctaacgtcatgggcaccgtccatctgctgatgaaagacgccaacctgctctatttcgtcatcgccagtctggtggtcggcagcattctcggcatgaaccgggtgatcctgatccaggggatgattcgcatgttcgtgccgctggtggtgggcacgatcacggcggtgatcaccgggctgctggtgggcaagctgtttggctttaccttctatcacaccttcttctttatcatcgtgccgatcatcggcggcggcatcggcgaggggattttaccgctgtcgctggcctattcggcgatcctgggctcgacgccggacgtctatgtcgcgcagctggcgccggcggcggtgctgggcaacatcttcgccatcgtgaccgccggggtgctggcgcgcattggtatgcagcgcaaggcgctgagcggcgacggcatgctgatccgttcggcgcaggagaacgcgatgttcgccatcaaggagcaaggcggcaacgtcgattttcaactgatgggcggcgggctgctggtgatctgcgccttctttatcgtcggcggcctgttcgaacacatcgtgcatattcccggcccggtgctgatgatcctgttcgcggtgctgtgcaagtactgccgggtgatcccggcttcgatggaaaccggcgcgcacagtttctacaagttcgtctccaccgcgctggtgtggccgctgatgatcggtctgggcatgctgtacgtgccgctggaaagcgtggtggcggtgttctcggtcggttatgtggtggtctgcggctcggtagtgctgtcgatggggctggtcagtttcctgattgcgccttacctgaagatgtttccggtggaagcggcgattgtcacctgttgtcacagtggcctgggcggcaccggtgacgtggcgatcctgtcggcgtcgaaccgcatggggctgatgccgttcgcccaaatcgccacgcgcatcggcggcgcttccacggtcatcggtgcgacgctgctgcttggttggttagtctgagtccagagtatcttatggataaccggggttggattgccccggtttttttatgcattttttttcgcttatcgtgatagtgctgattattgccttgaaaatcattcgtgtggcgcaaatgcatagccgtactttatctaagaaaattctgtaatcggtgaaaatgtgtctattcttttctcttaagggattatcgttctcattcagagtgccgagggaaggcgccatcgcattaccgatatccccgtattgattcaacaccgggccgctgccgttcaggcaatccgccagttggggcatccccccgattgaattgacgaatatggagataaggttatgtcatcaagcaatgcttccgttaaggccgaaggcgtattagccctgctgggcgcttataaacccgatgaagacgacaccattaccgtgcttcatccgtcgaaaacgttcgaaaacgccggcctggagctggtgcgcggcgatcgcagttggcacgacaagggcgtgaccgacacgccggtctctctgacctacagcttctgggaaaaggcgccgggcaacatgtcgagcatgggcatcagcggcttcagcagctttaaccccgaacagcgcgagcaggctaaactgtcgctgcagtcatggtcagacgtggctaacatcaccttcactgaaaccagcaacaccgccgccgccaacatcaaattcggcctgttcgactacagctcgcgcggctcctatgccttcgcgtataacccggacacctcgccttcggtcgccgggcagacctggtataacgccaagaaccacaccttcgtcaacaaccagatccatgagaacgagtacggtcgccagaccttcacccatgaaatcggccatgcgttggggctgcagcacccgggcgactataacgccgcaccgggcgtcagcatcacctacgctaaagacgcgacctactttgaggacagccgcgcgcacagcctgatgagctatttcagcgaaagcaacaccgggcaggactttaaaggtgcgtactcttccgggccgttgctcaatgacatcacggcgatccagcatttctacggcgccaacatgaccacccgcaccggcgacacggtttacggtttcaattccaacaccgatcgcgacttcctcaccgccaccggcgcgcaggacaaaataatcttcaccgcctgggacgccggcggcaacgacaccttcgatttctccggctttggccagaatcagcgcatcaacctgaatgaaaaggcgttctcggacgtcggcggcctgaaaggcaacgtgtctatcgctgcaggcgtaacgattgaaaacgccatcggcgggtcgggtaacgatgtgctggtgggcaacgccgccgataacgtgctcaagggcggcgcgggcgatgacgtgctgtacggcggtaagggggcggatcagctgtggggaggcgccggcaaggacaccttcgtctatttcgcggcggaagagtcaacggcggcggcgccggattggatccgcgacttcgtgcgcggcgaggacaagatcgatctgacgctgttcaacaccggcagcgccgacggcatccgcttcgtcgatcagttcagcggcaaggcgggcgaggcgacgctgagctacgatgcgcaaaatcacgtcagtgacgtggcgatcaacctgggcggcgcctttgacggcagcgatttcctggtgaaagtggtgggacagccgctggatgcgggtgatttcgtgctggcctgatgcaggcaacaaaaatagggcactttgggcaaaaacccgacaattcctattaattacgtcatattagcgtgacatagtagcgcgcagaaggccgggcttgcatacctcgggcttctgtcggatcgccaaccttcttcggttggcgattcattttccgcctttcagcatgttgatggcggcgccgagcaggatgcgccgttcgatatcgttgctgtccgccagctgccgcgccagatgtttttccagcgtttccaccgacagcgcttcgccgcgatgacgcagctgcatcacgccgtcgccgatcaggcgtgcgacctcatcccatacgggtttaatctcctgttccgagaacgtcatggtctacctcggctggttgatttctgcccaatgtagcagctgagctgcggcttcgctacccgctgcataaaacaggaagtataaaaaacaagccatcagtatttcttctggtttttacgctcaatacttgcggtgtcgaaaagcaggagaaaacatcatgaactgggtcgaaaccttggcggagtactaccgcctgagccgcacgggtgaaacgcagcattggctgtgtcgccgctggttgcttcagggggaggcgcgtttggcctatttgcgggagttgctggagccgaccgcgccacggcggcggtgaacagggcgccggcgttgccggcgtcatttcgcgggatcaaccgaaggcgatcgccgcccaacgcaacagcagcagcgccaggcagatcagcagcagcaccaccaccattttactgagcttattgcccatgcgttttgttgccacgctgtcctcccttttagctgaaataccacccgccggcgaggaggatgaggaaaagcgtcactaacgcgacgccgttgagtaagtcgctgaacgtatcgtcagcatcgatgtcattttgccgcatgttaccgcctggcggacgccattgggtgaataatgttcacagtatgccccccgcagcgcgacaggcacagcgaagaacggtaaaaacgcgtaaaggtggcggtggcggaacgcgcagtcgcgcctgcgacggatgcagacggccggcaatacgttgtactatcctgtctgcattgaggcatttttccaaaaggtataatcatggcgacggcaattccacagaaatacgaacaccttgagcgttgggcattcggcgataccgagcagcaggccgatgaagtggtgcaattgatcctcaatggcaccaaaacggccacctgttccaacctggacggcgaggggatcccgcaggccggcgatctgttcctggtggtggacggcaagggggagccggtctgcgcggtcgagctgaccgcggtggaaatgaaaacttacgatcaggtcgatgaagcgcacgcctttgccgaaggcgagggcgatcgctcgctggcgcattggcgcaaagagctgcagcgcttcttcgaagagtacgatctgttctcgccggacatgacgctggtgttgatgaatttcaaagtcgtcgacaaattctaatcttatgcgcgccgttccctacgagtgccagtgggcgagcccggagttggccgccgatctgatagccggccgcgcgacgctggcacaagacgaaaattgggcgcgcagcggcgcccgcgatcgggcagagtacatcgagtgggccaaccacgtgtgcggcatggcctgcctgaaaatggtgctgggccatcgcgacggcgaaacgccgccgctgttggaactggcgcgccgcagcctgccctacggcgcctatgtgcgcgagggtgaacggataaagggcctgatttacgcgccgttcgtcgagtacgtgcgcgagcagttcgcgctgcacgcggaggtgaaggtggggctggaagctgccgacgtgccggcgctgctcagcgaatgccgctactttatcgcttcggtgcatcccgccattcgccggccggagagcacaccgccgcacaggggcgggcatctggtgctgatcaccgccgccgatgcgcaaagcgtgaccttccacaacccttcgggcgacagcccggcgacgcgcgagcgggtatgcctgccgctcagccgcttcgccgctttctttgccggccgcggcatcgccatcgcataaaaaaacgcgctgtttccgatgaaaacagcgcgtcgtcagccgttctgatgcactatcatgccagccgcatcacccaggcgtccgcctgccgatcgtagtgttgcttgtacagcagcgactgtttgccgtcgaggatcgccgggatgctggtgtgttcatcccagccgtccagctgcatgcacagatccggatcggacttgcagggaatgctcagggtgccggcgcggtcggcgccggcgtgaagatgcgcgtcatcgacctcgaagctgccaatttttacgacggttttgctcatgggaactccttgctcaatggtgtggtaggaggttagaccagttcggtcatcggtaagagcatagccaaatgagcaaaaaatgccacataaaaattacattttggaaacaatttccacgccggcaaaacacaacgcctagtactccaccacaaaactgaggttgtcttgatagctgccgaccgccacttccgtctgcgccgcattgaccgccgccttatacgggatgctttgcgccagcccggtgccggcgccgctctgtttgttggtgctatcccaaacggtcgtcgtgttaggcaagtaaatctggtactgcatgaagttgctggtgccgcttttcatgcgccgccaaccggtgaccgggttattgccgttggtgaaataggtgttgtatccctcggttttggtgcaggtcagggtgatgctctgattgacaggattgaactgcccgaccaacgccatgctgccgaaattgacgttgggcgcggtgccgatcaggcaatctttggtgatggtgacgctgacgctgaccgtgctgggtttgtcgacgccgtcccaccaaacgcacaggccgagcacgcccagaccgcaaatatggtaattccagatcaggttgatgctgtcggtataggttcctgcgcgcacgttggcgccggcggtggttttgatatacagcggaaagttgacgttggaggaaatcaggatcagcgacagcaggttgagcgagctgtagtcgatggtttggccgatgctgtaaggatattggtagttggcgtcggggtagatcaggtaagcgattttatcgcctgaaccgtcggtgttggcaaccgccatattgttggtggtggaggcgatcttgaccgtgacagtgttttgcgacagcaaactgagcccgagcccggtgcagttgaggccggcagtgccctgggcgttaatctgcccgttgtagaccacgaaagagctgcttcccggtaaggtgacggtgccgttggtggtggcgcagtcggcgaatgcgcgctgacagagcagcagcgagagggttagcaataaggctttcaatccccgaaacatagtgactctccgtcgttgaattagcggcagacaaccgggccgacgcgctggatgccctgaggcttcgccagactgaattccgcctgacacggcgggccgccgtcggccgggatcacgctcagacgattgtgttgttgcaccgggtcgatataggtcatgccgtcccaaccgacatagctttgctgattgccgccaaccaccgccacctggctgccgttggccagcggtttgccttgctcgtcaaccagttcgacgtcggcggcggagatgggttggatggggaactcaaccagaaaaccgctgtgatcgcgaatggcgacggttttttccaccgtcggcagcgcaacgtcggcgggcaggctaagcggatcaatctggaatttcgcatggtagtaagaggtgacggtcggcaccagtaaatagccctgggcatcggtcttgccgatcggctggttctcatagctcaccggaatgtcggcgtatccttgcgtggacaccagcgcaaaggcatcgttgatggtgttggtggcgtatacgccgccgttcatcgccaccagcgaaccgctgatttcgccccagtggttggtttcatcgcgggtgccgtatacgcccgctcgggcttcgagtctgcgggttcgccaggtcagattcgcctggcggtaatcgccgccgctcgggttattggcgtaggccagattccagccgaaaccgccatcggtcggcgcggcgcggctgtagctgacgcgttcgctccagcggttgttgttgtcgcgcgcggcgctgaggctggccgtgccccagctgtcaaacggaatggagagctgcagttgggcgctgtaaccgctgctgccgatttcccggttgagggaggcgtacaggctgctgttgcgccaaagcgacacactgtaggacaggttcaccaggcgggtccgttgagcgatggcgtcgcgaacgtcaaaataaccggcgccgaggctgcctagccggcccaggctgacgctgccggtcaactgatcggtgcgacggctcagacggtagtcgcttttatacacggaaatgtcgccaaaatcggcgctgcgcaggatgcgttgcgcgttgaggctgaaacgtgggttgctgtaggtgtagccaaagctgctctgatcgccgtggttgccggtgtagcgatagacgggctgaggatctggctgctgcaacggcctgccggtcagcgggtcataataggcgggggatggtatcggctggccgccgttaaacgcgtcgtcgccggcctggctgacgctgtaggacgcgttgagaaccccccattgtccgacgcgaatgtcggcgccgccgccgccgaccgccaactcggctgcgccttcggcgcgtccttccagggttaaccaatcagtgacgccgtaacgtaaactggcgctgcctacccattgcccgtaatcggcagaattcaacccgtagttgcgtcgcagcaagccggtggaaatgctgaaatcgctcatgccggtctgcagcaggttgctggccacgtagaacggtaccgtggtgctgacctggcggccgagggcgtcggtggtgacgacggtggcctgacccgcgccgttaatgtagggcacgctgttgagggtaaacggcccgggattaatgttggtggtgctgtttttatagctgttgatgtataaatcgacactgctgggcaatgccgcctggccggaaaactgcggtaacgggtaggtgataagatccgggcgcaccgcgaaattgcgcgccaattgcaagccgccgatgcgcacggcgctgctccaggggagcgagccggtggtaaggtcaccggcgatcacactcagcatccgttgatcatcgttgaaacgccagtagctgtcgtaccgaatatagcgaccgccatcgtcgtttggcccgccgttaaacccgctgcggtagatgccggtgttggcgacgacgccgaacccgtcgaacaggcgctgttcgctccacgccgacaggtagcccggccggccattgccgttgctttggctggcgtagatgtcgtagttgaacagcaaaccgaggctgctttgcgccggcaagcgctgcaacggtgaacgggcgccgatggtttgctgcggcaaccagtcgttgggcacgttgatcagcaactgctggctctcgccgctgtagctgacatccaccttctccagccgatcgacggcgatttctttcgcctgtttatccgctaccggcagcccggcgtcgagcagttgttggggtgtcatgtagtaatggccgccgcggtagttgaccggcacgacgttgccggtttggcgcccgttgacgaccggctccagatacagcgtggtgtccggcatgctgacggcgctgggcggcggcggcagatcgtcgccgagcgcaaacggcagccagccgccggccgccatgctcagcatggcaaacgccagcggcttaaggctgaagcgccgcgtcgatagcctccctgtcggctgcacctgggcctcaataagacggaatgactacgggctgtttgttgtcattgaccgtggccatcagcttgccgctgctgaaagcgcctgcggacggcaaggcgaagcgcatctgtgaaccgggcagcacgtatcccatcaggccaggattcaggctgcggccttgcagcgtcactttcgagatacgggcatgcactgcgccttggtttcgcacctccagccagcgttcgctgctttgctgctgtagacgatagctgagctggggttggctggcggtcgcgtaatcgcgcggtttttcgctgtcctgtttggtccaaatgcctttgccgctgacgaacagcggcaccgagtagcgcatctggaatttcagccccatctccgcgccgccgggagcggcgctcgacgctggttctttcaccggcacttcatcgaccaaaatgcggtaggcgcgctcctgtcccgccgccggggccgactgtttgatcaggcgtatcagttggcgtttgcctggcgctatcgacgccaccggcgggctggcgatcacgtcgctttggttgctgtaatcgtctttgccggcggtttgctgccaacccagcacgcgaatttgcatatagaccggtttgctgtcgcgattttccagccacagcgcggtggcctgctgttgatcttcaatcaccggatcgatcggccaaatgagaatggaagccgcggccagggcgtgctgttggcttgccaggagcaaggctgccgttaacggcagtcggaagggtatgcgcataactcaatccttattgcaaaaaacttaataagtgaccgtcaacaagaccgtatcgctgtaaacgccactggtgggcagggtactggtcgaaaacagacgggcgtaaaccttgatttcttgcgtgctgccggtggcggcgacggtctgcgccgcgccgccgttggcgccatctccccaaagggtggcgtagttgctgtcttgataaagttgatacagcagcgtttccgccgtgacggcattttgtaattttctgccgccggcgatggatccggtcacgtgattgccgacgccgagggccagcgtaacgctcagccccgggttgcagcgaaacagcaccgaaccggcaccgctgctggagacgatgctgactgcgttgctcagcgaggacaactggccgaagttcagggtgccgaaggtggtcacgtcactgacgccgctgcccaatacgcagccttttaccacggttgcattgacggtgaacggctggcttttggtcaaatcgttgacgccggtatcgctttgggccgggaaaagcggcaggcagaacagcaaaccgcaaatggaagcgcgcatcgtcattaccaattgatcgtgacctgtaccgtatcggtgtagctgcctgtcgggggtgtggactgcgccgggatcatgccatagaccggcagccagttgtccgtaccgttggcggtttgtgacacgcccgtcagattatcccaaatggtgctgtgggcggcgttggtgtacaggttgtaattcacccgttggcctgccgcgctttgcaggtagcgggcagcggtattgccgctttgcccgccgccaagcagaacgctgtagctggtgccgttggtgcatttcacccgaatggcgccggcgttttgctgcccggcgacgctggttgcggtgctgagaaaatacagcgtgccgaaattcagcgtgccgaagctgacgttgccacctgagctgctgccggcctcacaggcgctgagcaaggtcgcgctgacgccgagggtcgcggttttactgtcggcctgcgccaacagactgcacgcccataatccgcagcagcaaagcgcgcgccgcaccgttaccaggtgaccgtcatcgtgacggtgtcgttataggtgtccgccgccggggtagatccggccgccggtacgcggccatagacgatcagcggaacggcggcgccggtgccggtgccggtccgcgcgttggcgccgctgccccaggcggtggtgcgtgcggcatcctggtacaggttataactgatgaatgcgcctgccgtgctggccatgcggcgttgggtgcctgaagtgacgtggagcccgttgtccagcgccaccgtgtagtctgtgccggtggtgcaggtcaatgacagcgtaccggccccccctgcgccggtggcgctggcgtcgatgatgttggccagtgaagagtaagtgccgaagctgatggagccgaagtcgttgacggaaccgctgctgttgccgcctcccacgacgcaaccggcgccgatggtcagcgttacgcctaacgtgccttgaatggtgcctgctgcgttagccgcgccgttggcgcacagcagggttgctaccgaggtcaatgccatcagagtttttttcatcttatattccttgccgtatgagagaaagcccgcaaagacgccacccagaggtgggttgaacgtattcatttagctgcactttaattaatagaataagaatcgggaattgtcttgatgaaaacgagaaactttttattctcattccccggctggcggggctttcagacgaggtataccgataaagtgaaatgattagaataataacgaacggcgatgggaatattattagcgttattttatcgccggggagtttcattccccggcgcggcattgtttacaggtggaaatccagggcgccatcccgcaccagctcgcgcggcaggttattcttgatacggctgccaatgcgtttggcgatacccagaggttgcccctgataggtgacgatgcactcgtcgcccgccggtggctgctcagggtagagatcgcggccgtgataccactcctgggccagcgcggcgtccagctcgaagtgctgtttgccgccggcgcccgcgagggcgatcgccgcttcgtgctgccaacggaaacctttcgggaaacgctccgccagcttgagaccgatgcgcgagaagcgcaccttgccgaacagcggctccagctcggccgggaacagccagatttccttatcgcgctcccacagccggctgtcatcgccccaggttaagccggatgcggcggcggcttgggcgaccagcgtcgcctctttgccggacagtgggctgaacggaaacttaccgactttataggtcggtttcggcaacggtgccacggcgtgctgtttgcgcagacgggcgacgaaaaacccttcgctgtcgtaaatctgcgggaagacgtgcagaaaaccttcggcggtcaatgccttgtcagcgccgggaaacagctcgcccagcggttcgacgctgaccgcgtcgccgtaggtgtccagcaaccaacgcaccacctgctgattttcctgcgcattgagggtacaggtggagtaaaccatcacgccgcctggcgccaacgcatggaacgcgctgtcgatcagctcgcgttgggtggcggcgatttcggtcacgctttccggcgaccagttgctcatggcgtccggatccttgcgtaccacgccttcgccggagcagggggcatcgagcagaatggcgtcgaagctctccggcagcgcggcgccgaacacccggccgtcgaagtgggtcagcgcggtgttcttcacgccgcagcggctgatattggcgtgcagcactttcacccggctggcggagtattcgttggcgacgatgcctccctggttgcccatcaacgcggcgatctgggtggttttggatcccggcgccgccgccacgtccagcacgcgattcggcgccgcgtcgccggcgaacagcgcgctgaccggcaacatcgaactggcctcctgaatgtagaacaggccgctcaaatgttcggcggcgctgcctaatcgcagctcttcatcgtcgcgttcgatccagaacccttccgcgcaccagggaatgggctccagtcgccagtcgtaatcctgcaccagcaccaggaagtcggcgacgctgattttcagcgtgttgacgcgcaggctgcggcgcagcgggcgctgacaggcggcgataaaatcttccatcgccagctcggcgggcatgatggcgcgggtggcgtcgaggaaagcggggggcagaaaaacggcggtggatttggccacggggcgaactctcagggtgcaataaagacaagggcgagagtttatcacaaagcggaaaaaaacagggcccggcattgccgggccctgagggaaacgcgaaagttaatcgcgcggaatggcggtgccccaggttttccagtccttcggctcttccggattcagcaggaagtgcttgttcggcgtcgctttcggcgccagcggaatagtcggcggggtggcgaaggcgataccgccgcggatgaactgctggaaggtgccgctcttgatcacgccgccggtcaggccgaactgcaggttgtaacccgacgccagccagaacacgctgttgttgcgcaccagatgctgatacttcttgctgatgcgcagcgcgacgtgcacccggtcggacatggcgccaaggtagaaaccggtgatggtgccgacctccacgccgcggaacagcaccggcgtgccgatctgcagcgagccggtttcggcggcgtcgagcaccacgctcaggccgtccagatagcgcgagtcggtgatgctggcctgctgcagctcgaaggtgcgcagctcgcggccgcgacccggctccacgttgatataaggctggagcagggtatcgaggttgctgacgccggcggcggagatctccggcgagacgatcgagaagcggctgccgagacgcgcgaaggtctgcacgtattccggatacagcaccgccttggccaacacttcgttgcgctccggggcaagctgcagcgactccacctggccgacgtcgatgccgaggtagcgcagcggcatacccgccgacagcttgctggcgtcgtaggttttcagcgtgatttggctgcccaccgcgcgggcggcggtttcgctggcgtacagcacgcggttggcccccttgttcagcgtcacgccctgtagattatcgaagctgatggcacctttcagcgcgcggttgagcggcgaagcctgcaccgtcaggccgctgccgttgagctgcaccttggcgccgccttcggcccagaagatgctttcgcgcgtcagcagcttgcggtattccgggctgatgtagacgtccacctcaaactcgttggccttcggccgaacattgacgatctcgcccacctggaatttgcgatacagcactaccgagccggcctgcacgtccggcaggctggtggcgctgagggtcagggtggtagcgggggcgttgccgacgatgccttcctcggctttttcgctgttggcgtacagcgggtattggccgccaggttcccccttgctgccgggaataatgcgcacgccgccgtctacccactcctgggcgctggcgccaagcacttccatgccgtcgatgcccagcttgacgtcgaggcggctgttgaccacgaatttactgtctttgtgcagcaggccgcggtactgcgcgtcgatggcggcggtgaataccacgccgccggcggtcagcgtgcggctcaggatttggccgactttcacgccgtgcaccaccagcggctgcccgacgtcgatgccgtagctttgcggcgcattcagcgtaacggtcagcacgccaggctgttgcaacagcgtttcgctgctgtccagcacgttgaagcgttgctgcggctcgccttcgcccggtaccagctccagcgtggtgccggtcagcaactggctaagcttggcgtcgttgaggctgatgcgcgggctgcgcatcacgatgcgggtgccgctgcgcatcagatcgaccaccgaaggatcgatggtcagttcaccgaccactttgctgtcctgttgcaacgtcagcttggtcagggtgccgacctgcagcccctggtacatcagcggcgtgcggttttcgctcaggctgttgccgctcggcagatccagcaggatattgacgccgcgctggctgtgggccagatcaggatacagggtatagctctgatcgcccttggcctgctggccatcggccggagaatcgaaggcaatggcaccgttgaccagcgccgccaggctctccatctgcaccgtggcaccggacaggctgaaatcgcccttgaagccggaaacgttccagaagcggctgttgctcttcaccaggttggcgaagcggcggtcgatcagcacgtcgatggtcacgcccttgttgccttcgctgatggtgtagtcatacaccttgccgaccgggattttacggtaatagaccagcgagccgctgttgagcgagccgagatcgtcggcgtgcaggtgaatcatcagctcgccggtattcaggcggtacttcggctgggtatcgagcgcggtgaagtgggtttgctccttgccgctgccgggcatcatgccgatatagttgccgccgaccagcgcatcgagcccggataccccggccagcgaggccttgggcgtcaccagccagaactgggtaccttcgcgcagcgagtcttccagatcgcttttgatactggcctccaccacgatgctgcgcagatctttgctcagactgattttttgcaccgtgccgacctcaacgccctggtagcgcaccggcgtgcggccggcgacgatgcccgccgccgattggaaatcgatggtgacggtggtgccgcgttcctggacattgttatagaccagccacccggcgatcagcagggcgatgaacggcagtaaccagaacggtgaaatgcggcgtttgttcttgacccgcgcttcagtcggtgtagtcggcgtttcctgttgcatgtgcatcccaaatcaatcggctatcgagccactcaacggcaagaatagtcaaaatgaccgccgagccaaagtaaaacgcggccggtcccatagtaaaagataacagctggtcgcggtttaccagcgacatcatcaaggcgataacgaacagatcgagcatcgaccagcggccgatccaggtgaccagacgtagcagacgaatgcgcgtcttcaggctgtgcgaagttttgaagtggatgctcagcaacagcgtgatcagcacaatcaccttggtaaaaggcaccagcacgctggcgatgaacacgatggcggcgatcggcacgttgccggaggtggccagtgagaccacgccggagaagatagtgtcttccatccgcacgccgttggcgtaaatgatggaaatcggcagcaggttggccggtatcagcaggatcatcgccgcgatcagcgccgcccaggttttctgcaggctgtagggctggcggtggcacatcggcacatggcagcgcgggcagcggccgcgcgcgtcagggtagccggtatagtggcaggacagacaaatgtgcagcgccgccggcgggccttccggctgttcctgcggatagtaacgctcccacagctgctccaggttagcgtggatcagcgtcaggatgctcagcaccgtgagcgacaggtaggcgatcagcgcgctgcccgcctggatgtcggcgtaatcttgcaccttgatcgccgccaccgccatgccgatcagataaatgtccagcatcacccactctttgagccgctccagcatcagcagcaccgggcgcaggttcatgccgagcgcgtggccgaagcgcaggtacagcagcgacagcgccagcgtcagcggggcgccgatggtgcaaaacgccaccatgctggcggtgagcggatcgccctggcggctcatctgccagatgccctccagcaaactggcgtcgatgcgcgtgccgagcaggcggatgctgatcagcggttcggtgaaggcgaacggcatcagcagcagcatggtgatcgccatggcggtcaggcgcgtcatcgaccagtcgcggccgtgcaccaccttggcgttgcaacgcgggcaataggcggcctgattgccgctgagcggcggcagcatgaacagcagatcgcactcgcagcagcgttggtggcgcgctttggaaaggggggcggtgatcgcgtgtattttcatctttgacaagtagctgcccttgagcccgccggaactgtcagcgtagctgaaaaataaaccggccgcgtcaccggcggtcgggcgccggacggtaaaacgaggtaaaccgggattctgagcggcaaacataccccgagcgacggggttttgtgaagcaacagatgattaaccttgtggctatacgcatttaatgcttattttatagggcctaagctttgggcttctggccatcttcactgtttcaatggttaacacatgacaaaagaacaattctacgcggaattaaaacgtgacctgagcgcgttgctcggcggggagaccaactttatcgcggcgctgtccaacgccagcgccttgctcaacgagcgtctggatgacgtgaactgggtcggtttctatctgatggatggcgaccaactggtgctggggccgttccagggcaagatcgcctgcgtgcgcattccggtgggcaagggcgtgtgcggcacggcggtggcggaaaatcgcgtgcagcgcgtcggcgacgtgcatgcgttcccgggccatatcgcctgcgatgcggccagcaacgcggaaatcgtgctgccgctggcggttggcggccgagcgatcggcgttttggatatcgatagcacggtttatcaacgcttcgacgaacaggacgaagcgggcctgaaagcagtggtggcggggctttgtgagcaactggaacagtgtgacagtgcgaaatatgtgactgtggcggcaagttgatcgacggttaacgtggcaattaccgatggcgtcattataatgacgcctgttcatgcctgtggcttgttggcaataccgttgtaatcaggaaatttcatggaaaatcaacctaagttgaactctagtaaagaagtcattgcttttcttgccgagcgttttccgctctgctttagcgccgaaggcgaagctcgtccgctgaaaatcggtatttttcaggatttggtagagcgcgtgcagggggaagagaatctcagcaaaacgcaattgcgttctgccctgcgcctgtacacctcaagctggcgttatctgtacggcgttaaagtcggcgcgcagcgcgtcgatctggacggcaatccgtgcggtgaactggaacagcagcatgtcgatcatgcccgccagcagcttgaagaagccaaagcgcgcgttcaggcacagcgtgccgaacaaaacgccaaaaaacgtgaagcagccggtgaatccgccgatgccgctcctcgccgtccgcgtccagccggtaaaaagcccgctgcgcgtcgtgaaggcggagccgcgccggaaaaccgcaagccgcgcccacaaactcgcccacagcccgctcgccaacctcgtgcagccaaagaggaaagccagccgcgttatgcgccagtcacggatatctctaaactgcaaattggccaggaaatcaaagtcagagcaggcaagagcgcgatggatgctaccgtactcgaaatcgctaaagatggcgtacgtgtgcagctctcttccggtctggcgatgattgtgcgcgcagaacacttgcagttctgatacggaggccaacccaggcatgaacaaattcgtcagattaacagcgattgcagggctgctgtgggcgggtgtcagttacggcgcggaaacagccaacatccgcatcggccaactgccccaactgcaacaggaaccccagcacgctacggtgagtgagcgcgttacctcgcgcttcactcgctctcattaccgccagttcgcccttgacgcggagttttcaggcaagatcttcgatcgctacctgaacatgctggactacaaccataacgtattgctggctgccgacgtggcgcagttcgccggcaaacgcaatcaggttggcgaagagctgaaaaccggcaagctggacaccttctacgcgctgttcaatctggcgcagaaacgccgtttcgagcgttatacctatgcgttgtcgttgctggacaagccgatgaacttcaccggcaacggcactatcgatctcgaccgcagcaaagcgccgtggccgaaagacaaggccgagctggatagcctgtgggatgcgaaagtcacctatgacgagctgaacctcaagttgaccggcaagaccgacaaagaaatccacgacacgctgaccaaacgctatcagttcgccatcaagcgcctgacgcaaagcaacagcgaagacgtcttccagctggcgatgaatgcctttgcgcatgaaatcgatccgcacaccaactatctgtctccgcgcaataccgagcagttcaacaccgagatgagcctgtcgctggaagggatcggcgcggtgctgcagatggatgatgactacaccctgatcaactcgatggtgccgggcggcccggcagcgaagagcaaggcgatcaccgtaggcgatcgcatcgtcggcgtcggccaggccggcaaaccgatggtggacgtgatcggctggcgtctggacgacgtggtgtcgctgatcaaagggccgaagggcagcaaggtgcgcctggagatcctgccggccggcaagggcaccaaaacccgcgtggtcaccttgacccgcgagcgcatccgcctggaagaccgcgcggtgaaaatgaccatcaagaccgtcggcaaagagaaggtggcggtgttcgacatccctggcttctacgtcggcttgaccgatgacgtgaaagtgcagctgcagaagatggccaagcagaacgtcaagagcgtgatcatcgatctgcgcaccaacggcggcggcgcgctgactgaagcggtgtcgctgtccggcctgttcattccgagcggcccggtggtgcaggtgcgtgacaacaacggcaaagtgcgcgaagacgccgacaccgacggcgtgacctactacaaaggcccgctggtggtgctggtcgatcgcttcagcgcctccgcctccgagatcttcgcggcggcgatgcaggattacggccgcgcgctgatcgtcggcgaaccgaccttcggtaaaggcaccgtgcagcagtaccgttcactgaaccgcatctacgaccagatgctgcgccctgagtggccggcgctcggttcggtgcagtacaccattcagaagttctaccgcgtcaacggcggcagcacccagcgcaagggcgtgacgccggatattctgatgccgaccggcgtcgatccggcggaaaccggcgaagcgtttgaagacaacgccatgccgtgggacagcatcaatgcggcgacctacagcaagaccggcgatatggcgccgttcgagccggaactgctgaaagatcaccagcagcgcatcgcgcagaatccggagttccagtacatcgcgcaggatatcgcgcattacaaggcgctgaaggataaacgcaatatcgtgtccctcaatctggcggtgcgcgagaaagagaaccacgatgacgatgcgacccgtctgaaacgcatcaacgagcgtctggagcgcgcgggtaagaagccgctgaaatcgctcgacgatctgccgaaggattaccaggagccggatccgtacctggatgaaaccgtgcatatcgcgctggacctggctcatctggaaaaggatcagcctgctcagcagccaacgccggctaagtaaggccacggctttgcctgtgaaaaacgcaccctcgggtgcgtttttttatggttgcggcaagcccggcttaagccggtttcttgcggtgacgcagcccgagctgaatgcaggaaaccaccaccagcagacagccgaacagcgacagcagcagcgggatctcatgccagaacagccaaccccaggcgatgttgaacacgatgccgatatagcgcaccaccgagaccacgatcaggttatcggaagagaaggcctgggttaagacgacctgccccaacagcgacaccagggcgatggcgagcagaatggcgaactgataggcgttgggccaaacgaacgcgttccacatcagcggcagcgagatcagcgttgcgatgaacaggaagtagaacacgatctcgtagttgtggtggcgcttgctgagtttgttgaccgacagataggcgatcgaggcgaacaccgcgctcatcacgccgaccagcgacgccagggtataggccgagaagtgccacggccgcaccagcagcacggcgccgatgatgaccatcgccagccaaaacgcggtattggcgttgacccgttcacgcagcaccagcaaggagagcaaaatggagaaaaacggcgacagataggccagcatgctggcgtcggccagcgtcagatgggcgatgctgtaaaaataacaaatgagatacagcccgcccatggtgccgcgcaacaccagcagcggccggtctacgcggctgaaggcgatgcggtggcggtacatcagcagcagaaccagcagacagccgatgctgctgcgaaaaaacacgatttcaccggtgggaatagcgtcggagatggttttaaccagcgcgttcatgacgctgaaaatcaacgaggcaaaaatggccagtaacacaccctgattcatgcttgcctccgccattgtcggtaaatgatgtccgcctgctcgtcgcaggtatcgtccagcaacgaacgatggcaatgctcggcgccgttccgggtgacgaagcgctgcagcgcctgctgaaagcgcgccaacagacgctgggcggcgggcatctcgacgtcaagccgctgcgccagcaagaccaggacgcgcagtttgcgcacgtcctcttgcggcacgcgcggcaggcgccagcgcccctgggcatcctggaagacgcgggcgaccctgacggcggaaaaatcatagtagcggccctgcgcgtccggctcggaataggggtcgaccagcagcgcggtataacgcgtaaacagcgcatagcattgctccgtcggcgtgagctgcgggaattggtcaatccagcggcggctcaccatacggggcggaaccgggtagttgtcgtcattcaaaaagcgcagcaggttaatggcctcgatgccgagccggttgagcaactgctggtaatcctgcgagagcgccagcatgtcggcgatcgcctcgggacagatggggccctcggggtgggttttatacaggtactggatcggcgcctgcggctggaatatcgcctgcagcgtggtttcggccagcgccagcggaggatgaacataattggtgatgctgaagcgctcggcggcgagcaggctgttgcagcgttgggcgtcaatgccgtgacgcgccagcagcgagcaaagccagtcgagttcggcgcagtctgaccttgcgcctgcgccggccagataaatccgctgcttgaacgccttggtgtaggcgcggtaaggctgttcggcgttctggtacttggtgtcggcgtagtagctcgacaggctgatgacctcgacgtgggattgcccggcgtcctgcagcaggctttgcgccatcaggccggagccgatggagggagagagcaggatcagtgagcgcagttggggcaacgccgcccatggcacctgtcgcagcacgtcatggtattgatcggcggggacggcaaggatcagtcggtgccagtcgccgccgaccagtgacagatcatcgtaatagcgatcaatcgtcacctgcgcatcgtcttgggtgcgctgcgccttaccggcgcccgtcagccacaggctgggcgtgtgcgccagatgttgcttcaggcggcgccctttttcgctggggcggttgtacaggccgatgcgcgcattggccgcggccttgatgtccgcagccagttggatcgccgccgggccggcgccgaggatcagggtgggaaaggcattattcatggcggtggggctccaaaatcaacagatcgtacagcggggtggcgagcggtttaccgctgacacgccagggcgagccggcggcctggtggtggtaagggcagttgaagatcgacttgaggccgttgccatagcgcaccagcaatttgccgcactggggcagcaaaggccgcagcgccttcagcaaaccctgcttgtccgccaccaaagaggcgatgatgatgtgatcgatatcgttgcgcgtcaggccgttcagcttgtcgatgcagggcatctgctgcaccagccccaggtggcgcgtgagccggcgggcaaaacgctgggccgccggatcgcaatcgtagcaaatgacggtggcggagagcctggcgaccagcgccagcgccgtggtgggcaatgcgccgctgcccaccagcagcacccgttcgccgggtttaatgtcggcggccgcgatctccaactgcagcgcgcggtcgaaactgttcaggtaggcgttggtttgcgccggttcccggcacagcgccgagacgcgatgtttctcgtagtcgcacaacgcggcgttggctgtcgcccgcagttgggcgatctgcgccgtgatcaaacggtcgttttccagttttcgacggtaggcctgcagctgtggttcgtcgttaaaggcttgcaggcggctgaagcggcgttccagcagggaaaaatggcgccgatcttgccgggcggagcggtgtagctggtgaatttcctgttgcaagccggcgagttgcgccagcatgtccgccttggtcagagtgtacatggggattctccgtgtgcgtgtaacagctgtgtcggcagcagataggggtagccctgcgggctgacgccgttttcgatgccgacgccaaatacgcgagacaccatcggatgtcccatcatctgatgggtatcgccgtggcaaacgacgcgtccgtgcgcgagcagcgtgagtgagtggcaatagcgcagcgccaatcccagatcgtggatcaccagcagcgtgatgcagcggtggcgccggccatagtcggcgatctgattgagcacgcgcagctggtggtggatatccagtgcgctggtgggttcgtcgagcaaaatgatctgcggctgagagacgaaggcctgagccagcatcaccaactgtcgctggccgccgctgagacggttgaaggggcgatcggcgagcgcggaaatgccgcattccgccagcgcctgttcgaccgcatcggcctgggcggcgctgacgcgccagctcaactgccgtaccttgcccagcagcaccatgtcaaaagcggtcaatgccgaatcgcagcgattaagctgcggcacataggcgatacggctggttttcggatcgagagggcgttcgcggtaagcgatctcgccgctggatggcaccatgcggttaatcgctttgagcagcgtcgatttgccggcgccgttggggccgatgatgccgccgagctgcgcctccggccagctcaatgaaacgtctgtcaacagcgagcggcgatgcagcgagacgccgacgcgggtgagggtcagttgagtcatgggcgtttaacctgtcgagtgacgaagtaaaacagcaccggcacgccgatcagggcgataacgatgccgatgggcaccacgccgttcggcatcaccagcttggcgacgatcgaggcgcacagcagcagcaggctgccgcagagggcggaaatgcagatcaggtagcgctgatcctcacccaccagaaagcgggcgaaatgcggggcgatcagcccgacgaacccgatggtgccgacaaacgagaccgaggcggccgtcagcaaggtcgccagcagaaaggccagcttgcgcaaggcgctgacattgatgcccagcccctgggcctgctcttcgccggcggacagcgccgtcagccgccaggcgagccgcagactgacgaacagtgcgcacagcaacacgacgccggtgatcgccacgccgtgcatattggctttgagcaggctgccaaacagccaaaagacaatttgctgcatggcttccggcgaggccagaaacagcagcagcgattgcagcgactgaaagaaaaacagcaccacgatgccgctcaacaccaatatttgcggcgtcatgccgcggcgttgtcccagcagatagacaggcacgcaggcgagcaacgccatcagcgaagccagcagcggcgtgcccagcgccaacgcgccgcccaggctgaagccggtgaggatcgccagcgccgcgccgaaccccgccgcggcagagatccccagcgtataggggctggcgaggggattagccagcacggtctgcatcagcaggcccgccagcgccaggctggcgccgaccaccagggcggtgagcgtcatcggcaagcgaatcgaccagaaaaccacctgatgcagctcgttgccaggcgcagagccaggccaaagcatccgcacgatatccgtgaggccaagttgcgcggcgccgacggtgagatcgatggcggccgccgccagcagcgcgccgagcagcgccagcgtcagtagcccgcggcgcagcctgcgccgtcgcaaaaacgcacgtcctgtgtgggccacggttattctccttgccagcgttgcaagaagacgccgtccgcctctatcggcaaatattgatggtagaactgcgccagattgcgcgcgggatcaacatcggcaaacgcggtgggatagagcgctttcgccagatactggacaaagataaaatcgtaaatcgtgcgcgcgccgccatggtaaagcgcataaagacgctgattttttatcgccggcagctgcggccatcccgcccgccgggcgtattgcgtcaggcgcgtctggaggggggctgcctgcgtgccgtagcccatcggcacggcgttcggcatgttttcccagtcgccaccggcgagaaaaatcacctcgggccgttgggtcaggacatagtcggcgcgcaagggggaagggctgccgacgacgccggcggcgatattgtcggcgccggccagctgcagcagcggcccccagatcgatgcgccatagctgctgccgtactcgccggggcccttgtcccccagctcaatgtaggtgaccggcggcggcagctgcgcctggcggatgcgccgacgggtatcctcgaggctttggcgatattcgtcggccagccgttccgctcgctcggcgtggcccatcgcctggcccattaaccggatgctggcgagcttgacttcaacgccctgattgaagtcgacgacgatgtaaggaatgttgagctgttgcagcaccggcaggtagttggcgaagccgtcgagctgccacttcgccaggatcagcaggtctggtcgcgtggtcagcaggcgttcaaaatcgaagctctggttatagagcgaaccgacatcgaccagctgagcgagccgtggcagcgccgcctgatagcgcgcccattggctggcgcgcaacgcccagtcgcttttggagaaggcgacgacctgttgataactctccgggccgttcaccgccagaaaatcttcgtagtaaaaaccgatataggcgcgctgtgcgggggcggccagggtaacctggcgtccttcaacgtcggtgaggtgaatttcagcgtgcgcgacctggcagaaaagcagccacgtcgccagcatccagacgatacgcgataacatgattgacatccctttacgattagttgtgatgttataatgtaacaattaatcgcgagattcaaactttcgtcgccgctgaatcaggcggggcatgatgaagcgcgctgagcgtatattggcctataaagcgtgaggataacggttctcgttgtcatggcgtgcggacaaagaaatttttctgcaaaatccctccgccttgcgcaacaatcgtttacaatttgccaaatcccggtcgcgcgtcgtttttgtaaagtttcgtatttttagtaggttaatggcgcgcaactcttgaaactgtgacgaatgcccatacgatccagggtatctggacagtgttttgttaacatttatgaggaagtaaacattttatgatgcgtatagctctgttcctgctcaccaacctggcggtgatgttggttttcgggctggtgctcagcctgacaggaatccaatccagtagcgttcagggcctgatgatcatggccggtctgttcggcttcggcggcgctttcgtgtcgttgctgatgtccaagtggatggcgctgcgctccgtcggcggggaagtgattgaacagccgcgtaacgaaaccgaaaactggctgctggaaacggtgcgccgtcagtcgcagcaggcgggcatcgccatgccgcaggtcgctatctaccacgcgccggacatcaacgccttcgccaccggcgcacgccgcgacgcctcgctggtcgccgtcagcaccggcctgctgcagagcatgagccgtgacgaagcggaagcggtcatcgcgcacgaaatcagccacgtcgccaacggcgatatggtgaccatgaccctgattcagggcatcgtgaacaccttcgtgatcttcatttcgcgcctcattgcgcaggtcgctgccggtttcctcggcaaccgcgacggtgatggcgaaggggaaggcaacggcaacccgatgatttacttcgccgtgtcgatggtgctggaactggtgttcggcatcctggcgagcatcatcaccatgtggttctcgcgtcaccgcgagttctatgccgacgccggctccgccaaactggtgggtcgcgagaagatgatcgccgccttgcagcgtctgaaaaccagctatgaaccgcaggaagcgggcagcatgatggcgttctgcattaatggtaaatccaagtcgttcagcgagctgttcatgtcgcacccgccgctcgacaagcgtatcgaagcgctgcgtaccggccagtacctgaagtaatcggctgaatgaaatgaaaaaccccggcttgccggggtttttttatggcatgcctgaaccgctttttcagcgtcgacgggggttaacgcggtgcaagaaccccccgagtccataaagcccgccttcgaataacgcctgtcggcctctctgtgcgtttaccgccgcggagcgagacgagggtaagccgcatcctggctgagtgacgaccggctgtttggctttggaagcgcatgttatatgctttggcgcaatgacatttgtccctgaggccctatgaaaatcaaccaccttcccttgctcaacggtgatgagctaccggcgcgcctggcggaattgacaggcggtatcgccgatgcggttgcggaactgttcaaccggcatgatgacgatgctgaacggccagctattcgctggcattcaggcgatcttcacctcccggcatttttccccgacgagcacgacagccacgattacgattacctgatcgtggacggcgatatgatcgtggaaggatgcctggcggtatcgccgcagcgcgaggacggcggcattgtcgtgctggggcggctgcaggcggatacgctgatttgctggggcggactggtcgtgcgtgatgatgtccgcatgcgccatgcctattgcagctcaggaaacgacggtgcgttcgtggtggggggagatctgaccgcgctcaccctggtagagacgggggagtttatccatgtccatggcgatctcgatgcgcggtgtctcgcttcgttgcagaacttcgttcaggttgacggaaacacgcgctgcgattgccgcatcgatagcgctcaggccgaagatctgatcaagcgcatgttcgcccctggcttactgaagggcttcgagggggtggataacgacggccaacgcattgttggctggtatccggatgacgacgcctatttagcgtgtctacgacaaggccgcagccctttgaggagcggcgactgacgccaggcctgcatcgcgctcgacgtggcccggctcaggcaggccacatcggattggggcgcggctctttctatgccctctatttcacctcgcggctgggctgcgccgtttgcgtcgtcggttgagtgatgcgcaggctgctgaccgccgcagccagggtggcgaacaccccagccaggatcagtgaagcgtgggtgccggaggccgggaacaggttgaacatcagcgccaccagcgcggctcccgaggtttgccccagcaggcgagcggtgcccagcatgccgctggcgccgccgctgcggttgcgcggcgcggcggagatgatggtgtggttgttgggcgactggaacaggccgaaaccggcgccgcacagcaccatgcgccagatgatgtccatattcgacggcgccgccggcagcagcgccagcgaaaacagcccgagcgcgaacaccgccagcccaatgcagcccagcaggccggcgtgcacgcgctccaccagccgaccggcgatcggcgccatcaccacgatcgccagcggccacggcgtcagcagcagcccggtcgccacctcgtcgcggcccaacgcgctttgcaggaagaacggcaacgacaccatcgccagcatttgcgcggcgaacgaacagattgaggtgcccatcgacagggcgaagatcgggatacgcagcaggtcgaccggcagcaacggaaattcctggcgcagctgacggcgcacgaacaccgcgccaatcgccagcagtgcggcgatttcgctgaagatcagcgtcaggctctggccctgggcgaagccgctgatggcggtgatcagcaggccgaaggtcaacgcgttcagcacggcgctggtgggatcgaaacggcggttatcgcttttctggccgttggccggcaggaatttcatccccagcagcagtgcgacgatgccgatcggcaggttgatggcgaacagccactgccaggatgcgaccgacaggatcgccgccgccaccgtcggcccggccgccgaggagcaggcgacgatcagcgagttgatgcccatgccgcggccgagaaaacgctgcgggtagatgatgcggatcagcgcggtgttgacgctcatgatggcggcggcgccaaagccttgcaatacgcgggcgatggtcagcgtgagcagcgagtcggacagggcgcaaaacagcgaggtgatgctgaacaccagcaatccggcctgatagatgcggcgatagccgaccagatcgccgagcgaggccagcgacagcagagagacggtgatcgccaactgataggcgttgaccacccaaatggagctggccgggctggcgttaagatcgcgcgcgatggtgggcagcgccacgttggctatcgcgccgtcgagcaccgatacggtaatgccgagggcgatggcgaggatcgccccatagcgttgcgggacggggaggccgtcggaacaaggacgcatgttggtctcagcggtgtttattcaggggagtattatcatgctaatcataatcgcctgcgattgcatgcccgttgcccgcttaattgtaaatagcggtgagcgggccggggttatccatttggcttcaatcgcttagcgcccatgtgcgttgcgcgtcgcgatctgttccgattatactgaaacccttgtttaaatttcctgaaacaaaaccgttaagtagggcattcaccatggctaacgcagattcagacaagcaaccggatgccgtctcatccgtgatgaaagtgttcggcattttgcaggcgcttggcgatgagcgcgagattggcattaccgagctgtcccagcgggtgatgatgtccaaaagcaccgtctaccgttttctgcaaaccatgaaagcgttgggctacgtatcgcaggaaggcgagacggaaaagtatgcgctgacgctcaagctgttcgaactgggcgccaaatcgttgcagaacgtcgatctgatccgcagcgccgacgtgcagatgcgtgaactgtcgaaccgcacccgcgaaaccatccacctcggcgctctggatgaggacggcattgtctatatccacaagatcgacgcgatgtacaacctgcgcatgtattcgcgcatcggtcgtcgcaacccgctgcacagcaccgctatcggtaaagtgctgctggcctggcgcgatcgggaggaggtggcgcagatcctgtcgcagattgaatttacccgcagcaccgagcataccctgaccagcgccgccgaactgttgccggtgctggatcgggtgcgtgagcagggattcggcgaagatgtcgaagagcaggaggcggggatccgctgcatcgcggtgccggtctttgacaggttcggggtggcgatcgccgggctgagcatctctttcccgacgctgcgcttttccgacgcggcgcgggaggagtatgtggcgttgctgcacgtcgccgcccggcgcatttccgagcagcagggctatcacgactacccgttctgaccgtcatttcgatgagcgaggcgctgccatggcagcgccttgttgttatttcgcgccgggcgtcagccgctgagaaatccgctccagcaccagcatcagcaacagcgtggccgccaccaggatcatggtcagcgtcgcgccgttggcgatgctgccgcgatcggtcaggctgaagatcgtgaccggcagcgtcgcccagctcggcgggtagatcatcatggtcgcgcccagctcccccatcgacagcgacaggctgagtgcgaaggcggagatcatgtagggggcgatcatcggtagggtgacgtgacgcaggcggaacagcggcgaagcgcccaggctggcggcgacgttctcgtagtcgccaggcagccgggtcagcccggccatcacgttgccgaaggtaaaggcggaaatcagcacgaagtgggcagcgggcacgatcaggaaggtgccgttcatctgcagcggcccctggctgaacgccaccagcatccccaaaccgatagagaccgaaggcaccgcgctgggaatgaaaaacagcgtgcccagcagccgctggccgcgcccctgatggtggcgcagcgccagcgccgcccaggtgccgcacagcagcgcgaacaggctggcgctgaaaccgatagccagactggcgaccagtgcgtcccaggaggcgccgctgaacgcctggcggaagtggttgagggtgaagccgctcggcagcacgccgttccactgctcactgaggctggacatcaggatcaccgccagcggcaggcagaagaacagggcgaacagcgtgaccgtcagcgtgcaggtcagggtgcggctggtgcgagaccaaatcaacatcgtcagttcctcagcccggcgcgcgccgcggcgtagcggtaaagggagaacagcccgagcgacagcgcgatattcaccacggcgatggtgcaggcgacggcgtaatccgcctccagaatcgctttggcgtagaccatcatcggcagcgtggtgacgcccttagcgccgataaacagcacgatgccgaactcattggtggtcaacagcaggcacaggctgccgccggccagcaaggccggcagcgcggccggtaaaatcacctggcgcaccacgcgccccggtcgggcgccgaggatgctggcggcctcgagctggctgcggtcgatctgcgccagtgccgccatcagcgggcgcatcaccagcggcgtaaacacggtgatttcggccaggatcacgccccagatggagtaaagaaagtccaccggcggcagggtgaaaccaaaggtcgccatcagcgtgccgttcagcaggccggcggagccgtagataaaggtgaaggccagcgtgatgaggaaggtcggcatggcgataaaggtatcgatcacccgggcgatcagtcggctgccggggaacggcgtgaataccagcagcagcgacagcagggtgccgagcaccaggcagcccagcgtcgccagcagcgcaatctgcagcgtgttgagcagagcgccgacaaagcggtgggattcgaacacctgttgcagcgcggcggcgctgaatagcccctgatcgtcggtaaacgcctgtttgacgatcagcgccagcgggtagaaaaacagtgtcgccagcaccagcagcggcaacaggatccacaggcggcgcggcaaacgcagccgcagggccgggcgaataagcgtagagtcggtcatgtcagtcctcgatcagtaccgcatcgtcgggggcgaagtagagcggcacgcgctcgccgatctgcggcatccggctgcgatgagtggtgaccacgcgcagcggatggccttccgcgtcgaactgcaggtgcgtcaactctccctgccaatgaatatcatgcagcgtgccgatgatgcagttgctgcgctgggcatcggcatcgagcgcaatgtgctgtggcctgatgcacagcagcttgtcgaagccgcgttgtgcgccgtaagtgaaacagccgatcactttgccggcgcagctgacggtggtcatgccttgctgcgcggtagtttccagggcggtagccggcagcaggttagcgcggccgaggaactcggccgcgaagcggttcgtcggatgatggtacagcgcgcgggtttcgccgtgggcgatgagatggccgtcgcgcatgatgccaatcttgtccgccagcgtcagcgcttcgccctgatcgtgggtgacgtacaggatggtcagatccggcagctcgcggtgcaggcgtgcgatctcttccaccatgctgtggcggatttgcgcgtccagcgccgacagcggctcatccagcagcaatactttggggcgcaccgcgatggcgcgggcgatcgccacccgctgttgctggccgccggagagctggttgggatagcgcttggcgtaggcggacatgccgacgatggccaacgcctcttcgacgcgctcggcggtcaggccgcgcggcttgccctgcgcgcgcaggccgaacgccacattgtcctcgacgcgcatatgcggaaacagcgcgtagttctgtaccaccatgcccaggccgcgctcatagggcggcacgtcggtgacatcgacgtcaccgatggcaatacgcccggcggagggctgcacgaagccggcgatcgctcgcagcacggtggttttacccgagccggaggggccgatcagcgccagcacttcgccgggggcgatggtgagcgtcaggggtttcagcacctcggtgccgcgatacgacacgctgacgcggtcgagctgaatgcccgacggcccggcgatgtcccggctgctatcccgcgcctcggcgcgggaagtgagggtagaaggcatggtcagcgtcattctgtcaccttgtgccagcgggagatatcggcggacaggctgctcaccacctggttccagtccggcgcccagatctctacaccctgcagcgcggcctgcgactgcctgaagttatcgtcggtcggggtgacatccttacgcaccggcatgccgtaggaaatggcgctgacgctgctctgcgcttctttgctcagcaggaaatcgatcagttttttgccgttggcgctttgcggcgcgccttgcaccaggccgatgtagtaaggcagcaccagcgtgctgcgtttgccgtccggcccggccggccagaacaccttgacgttcgggttgctgcgcatctgcgccaggttcatctgcagatcgccgttggccaccagcagctcccccttattgaccagcgcggtcagcttgccggtggaggccgaagggccgacgttgttgctttgcagcttgccgaggtagtcgaaaccggcatctttgctgccgaagctgtgaaacgcctgcagcatcactgcggtgccgtcacccgcctggcccggcgtggagtactgcagcttattgcggaactgcgcgtccagcagctgttgatagctggcaggcgcctgcggcagcagtttggcgttatagatgaagctcaggtagttgttcaccagtggcacgaactgcggctgggcgtcggcgatctgcgccgcatcctgcggggtgaaatcctgcagcagtttttccgcggcggcgcgctggatgaacggcggcagcgttaccagcacgtcggcctgcgggttgctgcgctccttcgacaggcgctccacgatggcgccggagccgccttcgacgtactgcaccttgacgccggtcgcctgggtgaaggcgtcgaactgggtttgataccagctgtgatcgccgtcgtgcagaccatcggcggagtagacggtcaccaccgcatcggcggcccaggccggcgcggcgccgagtgcgatggcggtcatcacgaccagacgagaaaatttcatagcttcagcctcactgttgcgggttaatgcgaaactggtatacaccagatatgcggccaagctaatcggcaaatatgacaaacaaatgaaagcggcaaaatatatttgccttaaaagggggatcgagcgtgggtgaggaaggcggggcggcgggcgccggccccgtgataatcgaggttagagcgtatcgacttcgatgcgcaggctgtcgtggcgccagtattcaatatcgaaatcgaggatgcggccgtgctgatcgtaattcagtcgacgcagcagcaacgcgggcaggccgaccatggcgccgagcgcgttggcggcgcggtaaggcagggcggtcgggtagaacgacaggtgcatgttgctgtaaatcaaatcgtaatgctgttgataaacctcggtcaggctgccgttgagatcgtgactgagcagttccggcacccgctgcggcaggcagtggttctcgcaatagcagatggcgcggccgtcggcatagcgcacgcggcgcagcagatacacctgatcgaacggttcgagcgccagcggctgcatgacgtcgagcggcacagtggttttttcgccggacagcagagcggtgcgcggcgtgcgcccttgctcctgacagagacggtggaagttggtgttctgcgtcggatccagccacagccgttccggcgtgacgaaccagccgcggcgatcggcgcggtagatggcgccggtggcttccaattgcgccaggctttcgcgaatggtgacgcgggtggtggagaagatggcgcacagctcgcgctccgaaggcagcttatcgccggcctgcagcgcgccgcgggtaatgcgcgcctggagctgatccttgatctgcaggtagtgaggcatatcgccctgatgttctttcatttcatctcgctatggcatcggcccgacattccggcacgcgcttattatacatagccagatgaattttttgtttcaccgcgctttgtcgtttgaccggggcaggaatttgccgccacaatgatcgcaatctggtatagaccaataggtgaataacatgtccgatcgtaactacctgctgttgacccccggcccgttgaccacgtcgaaaacggtgaaagaggcgatgctgtatgacagctgcacctgggatgaagattacaacctcggcgtggtgcagcgcattcgtcaacggttggtggcgctggcgacgccgtctgccggttatacctcggtgctgctgcaaggcagcggcagcttcgcggtagagggcgtgctgggcacggtcatcggcccgcacgacaagctgctgatcgtcaacaacggcgcctacggggcgcggatgatcgaaatggcgcggctgatggatatcgaccaccacgctttcgactgcggtgaggtgaatgaaccggacgtggcggcgatggaggcggtgctgaaaagcgatgcgcgcatcagccatatcgccatggtgcactgtgaaaccaccaccggcatgctcaatccgctgcagaaggtcgctggtctggcggcgcgcaatggcaagacctttatcgtcgacgccatgagcagctttggcggcatcccgttggatgtggacgcgctgggcatcgattttctgatcagctccgccaacaaatgcattcagggcgtgccgggcttcgcgttcgtcatcgcccgccgcagcgagctggagaaatgcgccggccgttcacgctcgctgtcgctggatctgtatgctcagtggcgctgtatggaggatcaggccggcaaatggcgctttacgtcgccgacccacaccgtgctggccttcgcgcaggcgctgaaagagctggaacaagagggcggcattgccgcgcgccaccaccgctatcaggccaatcagcggcggctggtggcgggtatgcgcgagctgggttttgagaccctgctggacgatgcgctgcactcgccgatcatcaccgcgttctattcgccaaaggctgatacataccgcttcgccgagttttatcagcgtctcaagcaacaaggcttcgtgatttatcccggtaaagtgtcgcagagcgactgcttccgtatcggcaacatcggtgaaatctatccgcaagatatcgaacgtttgctggcggccgtcgggcaggcgatgtactggaatcaataaggattgaccatgaaacagatcaacgcagtaatcctcgactgggcgggcaccacggtggacttcggctcctttgcgccaacgcagattttcgtcgaggcgttcaagcaaaccttcgatatcgacatcagcctggcggaggcgcgcattccgatggggctgggcaaatggcagcacatcgaggcgctgggcaagctgccggcggtcgacgcgcgctggcggcagaagctgggacgctcgatgagccatcaggacattgacgcgctgtatcaggcgtttatgccgctgcaaatcgctaaagtgatcgacttcgccgatcccatcgagggcgtgccgcaggcgatcgccgctctgcgcgaacagggcattaaaatcggttcctgctccggctatccgcgcgcggtgatggaggtgctggtgcccgccgccgcgcagcgcggctacgcgccggattactgggtcgccaccgacgatcttgcagccggcggccgaccggggccgtggatggcgttgcagaacgcgatcgcgctgggcatcgatgcggtggcgcattgcgtgaaggtggatgacgcggtgccgggcattgccgaagggctgaacgccgggatgtggagcgtcgggctggcgctgtccggcaacgagtttggcgccacctggcaggagtatcgccaaatgccgcaaggggagatcgagcgccgtcgcatggccgccgccaataagctgtacgcggcgggcgcgcactatgtgatagacacgctggcgcaattgccggcagcgatcgctgatatcaaccggcggttggcgaacggcgagcggccgtaacgaccgaacgcggggcgtaaaaaaaccggggattatccccggttttttcgttctgagacggcgttagcgatgcgctaattcgacttcgtcttcgctgtccatcacggctttgtcggtttgcttcatcagctggctggtgatggtgcccgccgccatggaaccgttgacgttcagcgcggtacggcccatgtcgatcagcggttcgaccgagatcagcagcgcgaccagcgtcaccggcaggcccatcgccggcagcacgatcagcgcagcgaaggtggcaccaccgcccacgcccgccacgccggcggagctgatggtgacgatgccgaccagggtggcgatccacaccggatccagcgggttgatgccgacggtcggcgccaccatcaccgccagcatcgccgggtagaggcccgcacagccgttctggccgatggtggcgccgaacgatgctgagaagctggcgatggattccggcacgcccaggcgacgggtctgcgcttccacgttcagcggaatgctggcggcgctggagcggctggtgaatgcgaaggtgatcaccggccacaccttgcggaagaacttcatcgggttaacgccggtgaaggccagcaggacagcgtgaaccacaaacatgatggccaggccgatgtacgaggccaccacgaagctgccgagcttgacgatatcgtgaatgttggaaccggcgaccactttggtcatcagcgccagcacgccgtacggcgtcagcttcatgaccagacgcaccagcttcatcacccaggcctgcagggtgtcgatagccaccagcacgcgctcgcctttcggcttgtcgtctttcagcagctgcagcgccgccacgccgaggaaggtggcgaaaatcaccacgctgatgatcgaggtcgggctggcgccggtcagatcggcgaacgggtttttcgggatgaacgacagcaccatctgcggcaccgtcagatcggccagtttacccacgtagttggtctggatcgccgtcaggcgcgcgctttcctgcgcgccctgcaccaggccttcggcggtcaggccgaacaggttggtgaccagcacgcccaccagcgccgagatcagcgtggtgaacagcagcgtgccgatagtgaggacgctgattttgcccagcgaagaggcgttatgcagcttggccaccgcgctcaggatcgaggcgaacaccagcggcatgacgatcatttgcagcagttgcacatagccgttgccgacgatgttgaaccagctgatggattctttcagtaccgggttatcggagccgtacaccagctgcaggcccagaccgaacaccacgccgaccaccaggccgaccagcacttttttcgccaggctccattgcttgtggcgggtttgcgccagcagcaaaaggagcgcgacaaacaccagcacgttaatcacgagcggaagattcatccccaatgtctccaataatctttcttataaaaacgactacgcatcacgtatgtcgcgatgtaaatatcgtaacagtttgctgagtggcctacttatatccaaatggaatttgatatagctttttgtgtgtttttgttcgttttatatacatcaaggtgatgtgttaggcggttttttgtgatcagagtctgatatttctgatttgctcgacataggattgcaccggcagggtgaaatcaccttgccagcagatggcaaacgccaccaggcacagacacagcacccgctccagctggttgcctttttgcgagttgagcagcggcaggcgaaaacgccagcggcatggccacaacagcggcacgccggcgggggtgagcatatcggccaacagatggctgaagtagccgatgatcatggcgtgcagcgcatcggccgggatcggccagctgcgcggtacgtccagttggaacagcgccatgccgccggcgatcgccagcaggctgtgggtgaaaccacggtggccgaaggcgcgggcgatgggcagggcaatccagcgcaggcgctggcccagcaccgacttggggtgatcgatgtccggcagcagcgaggtcagcagcgcggcgggtatgatgtgccaccagtcgccggtagccagctctggcgtcacttccgccttcttggcgaagatcgcgcaagcgacagagaatataaggtgtccttccgcggtcatgctgttgcgattccggctggtaaactgttaatttatccagtatatgggaaaattcccagtagtggaagcagttaccctgtaaccaattgtttattttcccctgttttacaacggcttgttacggcaatgggtaacaaagcatcgattttgacgggcgagaacaaaaagcgggcaatgggggagtgaaacggaaagcaacgagcgcggttttacggcgtgcggcgggaggaagcggcggccttgaagcgcgctgcgtggcagtgacaacgcgctgcgggccgtcgctttccctgccatgcagcataatgagaacgtcacgccaattcaataaaatgaaacggtgtttcgtttattttgcggttcggatcccttttatgccgcagggcgccggtgcccggcgccgcagaatcaggcaaagtgggcaggggtgagctgttcgagggtctccaactggtgatccgccagcgcccagcgcgggtcgtggcggtattcggcggccgggatcacgatggaacgcatgcgcgcggccttggtggcgatcatgccgttaaaggagtcttccagcgtgatgcagcgcagcggatctctgcccaggcgttcggcggcgatcaggtagacctccggatgcggtttgctgtacggcaggtattcggcggaaaccaattgatcgaagtagccttcaagatcgaacatcttcagcacctgccgttgcatgtgcagcggcgaggcggaggcgagaccgatgttcagtccctggctgcggcacagctccagcgcctgccggacgccaggcagcagcgggcgcgtctcgtgcaccagctcgatggcgcgctcgataatccgcgccgacacctcttcaagcgtaaccccttgccacggcatcgcctggtaccacattttcaccaccagatcgatgcgcagccccagcgtgtccggcagcttgtgacggtcggacagatccaagcccagcgcgccgaagatatccagctcggcctgcagccacagcggttccgagtcgatcaacaagccgtccatatcaaaaattgcggtttcaatgcgttgcgaataagccattagcggttaactcctgccggcgcgggtgaatgtgcccgacactttatcatcgccggtgacgagactaaaacctttgcctgcgcgtgtggcttttgccaaaacgcaggatattccacacctcgcgcaattttagccaccagcgctggtgttgacgctcggtgacctgttgcaacatgcgcgcataatccagcaccaaccccggcgtccaggtcatgctttctccgcggctgcgcagtaccgccagcatccacaggttgggatccagcaccagcagcagaaaacggcgccacagatgtttatcgcccagcacgccttccaacgcgctgtcgagcgcgccgatgaccgtggtggagcagttgcgccgggtcagattgtaggtggcgtcctgccgataacgcagccagaatgcgcgcagcgccgccgggttatagcggtagaattgaattttcttgtccggtgggcaccaggcggcgatctcgcccgccaggtcgggcaggaaacgtccgtcgacgttgttctgttcgccggcgtgcagcaactgacggaaatcctgaacggaatggctgatgtcgttgagtgggtagtggctgatatacacatccggcgcgagcgccagggcggcgtgaccggtggagatattgccgccgccgtcgaccgccgcgatgtatcggtcgacgatgtaacgccggcgcggatctttagccgcgccaatcggtgtccagacatacaccgtgagcggcgcagtctcatccgccggggaggatggctgccgcgcggggtgctgattcagagagaagtttgtcagtctgcgggcgatacgcaataaagcccagccggaaagcaccatcatcacgccgaggcaaaagggcaccgtcatccggtgaggcgccggccagccgataaagatcatcaacgaaagcaggatctcgccgccgcccgccagcgccacgcctttccatcgactgtgctgaatcaccgtggaggaggcgatgcgcacggcgccgtcaagcagcagcgcgctgccaaacaccacggtggcgacgatgttatcgtctgcgggcacgtccaacgttaaaaaggccataaagacaaaacccaatcctttcagcagcaccggcctgctggccgaagagccgatcaccagcgcggcggatatcgccaccagcccctccagcgccaggatgaccgccagcgcatccagcgccagcaccgaccggccatcctgcagtatgtcgaacagcatcagcgcccctgcggctatccacagccaaccgaacagcaccagcaggcggcgctggccgtgcagcgcctgcgcgcccagcaataagataatcagtcgaatcatggcggcctctggctaaacggataacgttatctcttcaatgatagtgcccggatgtcgttaagcagttgatttcggcgaattcggctaagcttgtagcacagcgggaatgaagaaaacggtgggcgagtttcgccaactgcaggtagacttagccgattcggttacgtcgctaacaaggggaacacatgacgtatcaacaggccgggcgtatcgccattttgaaacgcattctcggatgggtggtttttatcccggcgttgctgtcgacgctgatttccgtgctgggctttatctatcagcacagtgaaaaaaccaagggcatcaacgcagtgatgctggattttgtccacgtgatggtggacatggtgcgtttcaatacgccgttcctgaaccttttctggtacaactcgccggtgccggacgtggataaaagcctgttcagcggcgccaatttgatgttcatcatcatctatatattgatcttcgtcgggctggcattgcaggcttccggcgcgcgcatgtcgcgtcaggtcaagttcattcgcgaaggactggaagatcagatgatcctggagcaggccaagggcagcgaagggcacacgcgtcagcaactggaggaacgcatcacgctgccgcaccacaccattttcctgcagtactttccgctgtacatcctgccgatcgtgattgcggtgatcgcctggttcgtgatccgcctgttggggcagttggccggcgcggcctgaaccctgaacggggcgccgagcggcgccccggaacgttatgacgcttccggctgcaacagcgcctccaccgcacgttgcgcagccaccaaatgctggccgccgaacaggttgctgcggttgagcaggtagtacagctgatacagcggctggcgctcgataaatccggcccccagcggccacacgctctgatagccgtcgtagatctgcggcggcagctccggatacagcggcagcatcgccaaatcgcactctctgtcgccccagtagctggccggatcgaacagtatcggcccgtgggcggtcatcgcgcagttgcccggccacaggttgccgtgcagcagggaaggctgcggctggtggtgctgcaagcgcagatacacccgatcgacgatgtcgtcgatgtcgccgaaggtcatgcctttttccgccgccagctgcagctgccagccgatgcgctgctcggcgaagaattccgaccagcggcgttgccaggcgttgggttgcggggtggtggtcagatcgctgtcgaagtcgagaccgaactgcggttgctcgctccactggtgcaaatgcgccagttgttgccccaggcagtaggcgccgtgagcatcgaggggtttcagctgctgatactccagcagcaggaagctgtaatcgcgatcgctgccgacgccgtacacttccggcacccgcacgcttttgctgcgcgccagcaacgccagctgatcggcctcggcggtgaatatcggcagttgttcacgggcgtcgcatttcacgaacacctcgttgtcaccgtaactcacgcgccacgccgggtgaatgtcgcccccgggcagttcaatcctttcgcgtatctctgcgctgccaagatgttcacttaacagacggctaacggcttgccacatggtatgtccccctctgtgctgcctgataattcattaggttagcgtctttcccgtggtgaaaacacgacgcggcgcacagccggcgtcaaaggcggcgattttttcagcgcctcgccagctcaaagtatataccctattgattaatttaagcgcaataccgattgcaacttgatgacaacggataagcgaggggaggataagatgcggcggagagcaccgccgcatcagagaggcgtttaactgccaatgggggcgttttggttaccctgtaacggacgcagcttgctgtacaacaaggcgatcacgaacagcgcggcctgtacgatgacgatgcaggggccggtggcgccgtcgatgtggaagctgatcagggtgccgagcacgcaggagaacaccgacaccaccgtcgccaccatcagcatgcggtcgaagcggcggcacagcataaaggcgatgatgccgggggcgatcagcatggcgatcaccaggatcacccccacggcctgcagtgaggcgacgatggtcatcgccagcaggcacagcaacccgtagtgcaacagcttgaccggcaggccaatcacccgcgcatggtgcggatcgaagcagtacagcatgaagtctttgcgcttgagcagcaccaccgccagggtgatgccggcgatcagcagggtttgcttcagttcgccgtcggtaatgcccagcatgttgccgaacagaatgtggctcaggtgctggtcggtatcgatgcgcgagaacagcaccaagccgaaggcgaacatgccggaaaagacgatgcccatcaccgtgtcctctttcacccggctgttctctttcaggtagccggtggctaccgcgcagaagatgccggagaggaaggcgccgatcgccagcgggatgccgaccacgaacgccactacgatgccgggcaagacggcgtgcgagatggcgtcgcccatcagcgaccagcccttgagcaccagatagcaggagagcacggcgcacaccacgccggtaacgatggcggcgacgatcgcccgctgcatgaacgggtaggcgaagggttcgctgagcagttgatacagggtgtccatcagcggcctccggtttgcgaatgtgccacgcggcgccgggatgccagcaggccgtgtttcggcgcgaagaagaacgccgccaggaataccagcgtttgcagggtgacgatcaccccgccggtggcgccgtcgaggaagaaactcaggtaggcgccgatgccgctggtcaatgcgccgatgatgatggcgataatcaccagccggctgaagcggtcggtcagcaggtaggcggtggcgcccggggtgatcaccatggcgatcaccagaatagcgccgacggtttgcagcgcggcgacggtgcaggcgctgagcagggtgaagaacaggatcttcagcttcagcggcgacaggccgatcgacaccgcgtggctttcgtcgaagaacaccgccagcagatctttccacaccaggcacaggatcagcagcgaaacgccgatgatgatttccacctgcagcacgtcttcgtcggcgatgccgaggatattgccgaagatgatcgactgtacgttgaccgaggtggggttgagcgacacgatcagcaggccgacggcgaagaaggtggagaagataaagccgatgatggcgtcttcgcgcagccgggtgatgtggcgcaccagcgtcatcgccagcgccgccagcatgccggtgaagaaggcgccggcggcgtagggcaggccgagggcgtaggcgccggccacgccgggcaccaccgagtgcgacagcgcatcgcccatcagcgaccaccctttcagcatcaggtaggcggacaggaacgcgcaggcggcgccgacgatggcgctgacccagatggccttcaccatgtagttgtaactgaaaggttgcagcagaaggtccagcatcaggattgtttctccctggcctggctgttggccggcggatcgcttttggtgtggccgtagaacaccgccgggcgttcatcgtcggtcaacaccgtgacggtgcgcggatcgttgtcgtcgtgcagatccgggccggaaaggttgatatggcgcagcacgccgccgaacgcctgctccaggttgctctgtgtgaaggtggtctcggtcgggccggcggccagcaccgtgcggttgatgaggatcacccgatcgcaaaattccggcacgctgccgaggttgtgggtggagaccaaaatgagatggccctcgtcgcgcagcgcgcgcagcagctcgataatcgcattctcggttttcacatccacgccggtgaaaggctcatccagcagcagcaccgtgccctgttgcgccagcgcgcgcgccagaaatacgcgcttcttctggccgccggacagctcgccgatctgccggccgcgcagctcgctcaggccgacgcgctccagcgccttgtcgacccgcaacctgtcctcacgtgacggaatgcgcaggaagttcatcttgccgtagcggcccatcatcaccacgtcttccaccagcaccgggaagttccagtcgacgtcttcggtctgcggcacgtaggcgatcaggttctttttcagcgcgtccgccaccggcttgtcgctcagcgacacctggccggcggtgggcctgaccaggcccatgatgcttttgaacagcgtcgacttgccgctgccgttgacgccgaccagcgcgcagatcgaaccgccgctcagggtgaagctggcgttgtgaatggcggtgtgcccgttgttgtaggttacggtgacgtcgtccacgttcaattcagggcggacaaacggttcatgggtcattgatcgaatcctttggcgatggtttgcacggtggtgttaagcaggtcgatgtaggtcggcaccgggccatcgcgggtggacagcgagtccacgtacagcacgccgccgtatttggcgccggtttctttcgccacctgcctggccggcttgtcggaaatggtgctctcgctgaacaccaccggaatatggtgggcgcgcacggcgtcgatcacccggcgcacctgctgcggcgagccttgctcatcggcgttgatcggccacagataaacctctttcaactgatagtcctgcgccaggtagctgaaggcaccttcactggtcaccagccagcgctgtgcggccggaatgcgcgccaggcgttcgcgcagcggggcgtccagcgcgccgattttctctgcgtaggccttggcattgcggttataggtttccgcattggccggatcgtgctccaccagcgccttgcggatattctcgatatacaccagcgcgttgcttggcgacatccaggcatgcgggttcgggttgccgttatagggcccttcgcggatcggcagcggggtaatgccttcggtgactaccgccgccggcacctgtttgatgttttcgaagaaacgctggaaccagcgctccaggttcatgccgttccacaggatcaggtcggcgtgctgtgccttgacgatgtcgcgcggagtcggttgatagtcgtggatctcggcgcccggcttggtgatggattccaccacggcggcgtcaccggccacgttctgggcgatatcctgaatgatggtgaaggtggtcaccacgcgcagctttttttccgccagcgcgttttggctgaccaaggcggcgccgagcagcaggcaggcgagcgtgaaagggcgtaacaatgcagcagagcgggaagggcgactgcgacgaaaagcgcaacttatcaatggcatgatgacgtctcctggttcaaatgaaaatgattatcaatatcaattgaagcgaagtcaagcgccacttgcccaccgccggcggggtatttctccaactgaaaaataataccgtccggggagttatagcattttatgtatcagtatgtaaccgctgaaggtagtcctcacagctgcatatcgccacctccggctgttttcccaatgccaactgcccgaacccctgcgccaggcgcagtacatcctcttgatccagcacagttatgaacgcaaaactgttgctgccgagttcgtggtgaacgccattttcgtctgtcaccgacgtgacaaaaccctcgcgcgtcaattgcccggtcagcttcgccaggtcggttaatccctcttcctgatagcgaaaagtcaccacaaagcagcttgttgcagattgactcataaatcacctcttggtatatggatagcttgagattagcccaaaaaattactgcaggtgtccttacaagttgtatatgctacgcaactcattgaaaggagtgagggattctgtgaaaacaaaaataggttgccttacggcaattttacttttgtcggggtgcgccaaagacccgcaaacggcaagcaatatttcaggcagtggcacaacgcgcggcggttggttaaaaccccctccgcaggcaccggtaaaccgcacgggcaccccggttgcttataacgattacattcgtcaggcggccagcaactatggcgttgacgaaacgctgattaaagcgattattcaggtggagtccgggtttaacccgaacgtggtcagcacctcgaacgcagtgggattgatgcagcttaaggcttctaccgccggccgcgacgcctatcgcatgaagggacgaagcgggcaacccagctcgcgtgagctgaaggatccggcggtcaatattgatctgggaacggcctatatcaatattcttcaaagccagcagctagccgggatcaacaatccacagactttgcgttacgccaccatcgtttcgtacgtgaatggggcgggtgccatgttgcgcaccttctcctcggacaagcgcgtggcggtcaatcgcatcaatcagatgagcccggatgagttttatcagcacatccagaaaaagcacccggcaccgcaggcgccgcgctatttgtggaaggtgaccaccgcctatcaggcgatgtcgcagtaatcctctcttttgtcgaatcggccgctgaacgcggccgattttgttttcggcaccgttccagcgcgcgacccacctctcatttttcgttatttcctcaccgcttatcggaaaaaccgcacaaaaagttaaatttacgttagcagataaatctttacgttcattcaataagttaccggtaacatttttgcttttgtacgcattctgaccttcaataaatatacaaataagtaacaaattattttaaaaacccgtatcgatcgcaaggttgcggttaaatagttgtgactatctttggatggaatgtgacatgtcgaatcataaaaccaacaattcgcggcgcgatttcttgttgaaatcgatgaccttaattcctgcggcggtaattggtggcagcggcgttggcgcgctgacggcaccgacaccggcggtcgcagcctcgaacacctcaacgcagaacgattaccaaccgacctttttcaccccggaagagtgggccttcatcaaggccgccgtcgcgcgcctgatcccggccgacgatcgcggccccggcgcgctggaagccggcgtgccggagtttatcgatcgccagatgaataccccgtacgccaccggctccatctggtacatgcaggggccgttcaaccccgatgtgccgaaggagatgggctatcagctgccgctggtgcccaagcagatctataacctcggcatcgcagacgccgacgcctacagcaaaaaaaccgccggcaagcctttcgccgaactggatggcgcgcagcaagacgccatgctgcaaaagttcgagtccggcgaggcggagttccagcagctgccgtcgaaactgttcttctcctatctgctgcaaaacacccgcgaaggtttcttcagcgatccgatccatggcggcaacaaagacatggtgggttggaagctgattaattttccgggcgcgcgcgccgattttatggactgggttgagcgaggggagcgttatcccttcccaccggtctcgattcgtggggagaggggctaaccatggcaacggtaatgaaaaaagtagacgcggtgatcgtcggcttcggctgggtgggcgcgatcatggccaaagagctgaccgaggccggcctcaacgtggtggcgctggagcgcggcccgatgcgcgacacctatccggacggttcttacccgcaggtgatcgacgagctgacctataacattcggcgcaagctgttccaggatctgtcgaaaagcaccgtcaccattcgccataacagcagccagaccgcggtgccttaccgccagctggcggcgttcctgccgggcaccggcgtcggcggcgccggcctgcactggtcgggcgtgcatttccgcgtcgatccgatcgaactgcgcatgcgcagccattatgaagagcgttacggcaaaaacttcattccgaaggacatgaccatccaggacttcggcgtgacttacgacgagctggagccgttcttcgacaaggcggagaaagtgttcggcacctccggcaccgcctggaccatcaaggggcagaaagtagcgcagaagggcggcaaccgctttgcgccggatcgctccgacgacttcccgctgccggcgcagaaaaatacctactccgctcagctgttcgagaaagcggcgctggaggtgggttaccacccttacaacctgccgtccgccaacacctcggattcttacaccaacccgtacggcgcgcagatgggcccgtgcaacttctgcggtttctgcagcggctacgcctgctacatgtattccaaggcctcgccgaacgtcaacatcttgccggcgctgcgcatggagaaacgcttcgagctgcgcaccaacgccaacgtgctgaaggtcaacctgaccgacgacaaatcccgcgccaccggcgtgaactacgtcgatgcgcagggccgcgagattgaacagccggccgatctggtgatcctgggcgcgttccagttccacaatgtgcacctgatgctgctgtccggcatcggcaagccttacgatccggtaaccggcgaaggggtggtcgggcgcaacttcgcctaccagaacatgaccaccatcaaggcgttcttcgataaagacgtgttcaccaacccgttcatcggcgccggcggcaacggcgtgggcgtggacgacttcaacgccgacaacttcgatcacgccaaagaaggcttcgtcggcggttcgccattctgggtcaaccaggcgggcaccaagccgatctccggcctgccgaccccgccgggtaccccggcctggggcagcaagtggaaagcggcggtggcggatgcctacacccatcacgtgtcgatggacgcccacggcgcgcaccagtcgtaccgcaataactatctggatctcgatcccaactacaagaacgtctttggccagccgctgctgcgcatgacgttcgactggcaggaaaacgacatcaagatggcgcagttcatgtacgacaagatggcgccgatcgccaaggcgatgaacccgaaactgatcgccggcagcccgaaaaacgccaacagccacttcgacaccaccagctaccagactacccacatgaacggcggtgcggtgatgggggaagatccgaagaccagcgcggtcaaccgctatctgcagagctgggacgtgcacaacgtgttctcgatcggcgcatcggccttcccgcaagggctgggctacaacccgaccggcaccgtggcggcgctggcttactggtctgcccgcgccattcgcgagcagtatctgaaaaacccaggcccattggtgcaggcataaggacggcgaacgatgaaagcatttgtaccggcactggttctcagtgcagtgagtttttccgtttgggcgcaggacgccaccgtcagcagcgagctgatcaagcgcggcgagtacctggcgcgcgccggtgactgcgtggcctgccataccgatggcaagaacggcaaaaccttcgccggcggcctggcgatggagacgccgatcggcaccatctactcgaccaacatcacgccggacaagaaaaccggcatcggcgattacagcttcgaggatttcgacaacgcggtgcgtaagggcgtagccaaaaacggcagcaccctgtacccggcgatgccgtacccgtcgttcgcgctggtgaaagaggacgacatgcgcgccatgtatgcctatttcatgcacggcgtgcagccggtggaacaggccaacaaggactctgacatcccgtggccgctgtcgatgcgttggccgctgagcatctggcgcggcatgtttgcgccgtcgccggcggacttcgttgccgacgccaaggccgatccggtgattgaacgcggacgttacctggtggaaggcctgggccactgcggcgcttgccataccccgcgcagcatcaccatgcaggaaaaagcgttgagcaacagcgaaagcgacgactacctgtccggcagcaacgcgccgatcgacgggtgggtggcttccagcctgcgcggcgaccgcaaggatggcctgggcagctggagcgaagccgagctgaccgagttcctgaaaaccggccgtaacgacaaggcgatcgtgttcggcggcatgagcgacgtggtggagcacagcctgcaatacctgagcgacgacgatctgaccgccatcgcgcgctacctgaaatcgctgccgccgaaagacggcaagcagcaggcggcgccggtcgaagacagcgtggccaaggatctgtggcgcggcgacgacagcaagcccggcgcggcgctgtatgtcgataactgcgcggcctgccaccgcaccgacggcgtgggctacaagcgcgccttcccgtcgctgaagggcaatccggtggtgcagaccgaggacgcgacttcgctgatccacatcgtgctgaccggcaacactacgccggcggtgcagggggcggtatccaacatcaccatgccgccgtttggctggcgtctgaacgatcagcaggtggcggacgtggtgaacttcatccgctcgagctggggcaacagcgccaaaccggtgagcgcttccgacgtagccgacgtgcgtaaagaccgctcgatgatccgcgacgagaaggagatgggcagcgccgaggtgccggaccatccggacgcgaagaaataaaccgcttaagggctccgcaaggggcccttagtttttactgagtgcgccgtttttttcagcacattgtgttcgcaaatcgttcattcggccgataaaacatagacccgcagcggatttttcattatcctttgccgtcctttcatcaggcgtaagtatgaaatatcgctttaattcactgattattattaaaaaactcgcggagaaggatatcccgttaggcgcaatcgttgtcgccgcagattaaggtagactgtctcatgagtacgatttctcccgattcaggcacgctgacggccgctcagcctgccaaatggaacaaaaccgacaccgtctggatgttcggtctctatgcgactgcggtgggcgccggtacgttgttcttgccgatcaacgccggcctgaacggcccgctggtgttgctgttgatggcgctgttcgctttcccgctgacttatttgccgcaccgcgcgctcagccgcttcgtgctttccggctccagccgcgacggcaacattcacgatgtggtggtggaacacttcggcgtgctggccggcaaaatcatcatgatgctgtatctgatggcgttcttcccgatcgtgctggtgtacagcatttcgatcaccaacgcgctggacagcttcctgatccatcagttccacgtggccccgctgccgcgcatctggctgagcctggcggtggtggtggtgctcaatctggtgctgctgcgcggcaaagacagcatcgtggcggcgatgggcatgctggtgttcccactgctggtgttcctgatgggcatttcgctctatctgatgccgagctggaataccgccaacttcgtgcacggcctggccgccacccgcttcgacacgccggggttgtggcattcgctgtggctggcggtgccggtgatggtgttctccttcagccatgcgccgatcatctcttccttcgcctcgacccagaagagcctgtacggcgacaaggcggaacgccgctgcgcgcgcatcatgcgctatagctatgtgctgatctgcgttaccgtgctgttcttcgtgttcagctgcgtgctgagcctgtctcatgaagacatgctgcaggcgaaagagcagaacatcacggtgctgactacgctggccaacaagttctccaacccgctgatcgcctaccttggcccggtgatggcgatgctggcgatggccaaatcctatctcggcacttcgctgggggtgacggaaggggcgaccagcctgatcgacggcgtcacgcgcgcggtcggcaagccgctcagttcgcgcatgacgcaccgcatctcggcggcgtcgctgttcctgctcacctgggcggcgacggtgtggaaccccagcgcgctgcacatcatcgaaaccatcagcggcccgctgattgccgccatcctgttcattctgccgatgtacgccgtgcgtgcggtgccggccatgcgccagtaccgcgcggcgagcaacgtattcgtgctggtgatgggcctgattgcgctgtcggcgctgatctacggcctgatgtgatcccctgggcgcgccgcttccggcgcgcctcttatccttcctttacacatccctttgcaattaatcgccgacatgccgggcgttatctttgataatgcaagccattctcattagtattttctgaatgtattcatgactaaggagtttttcgtgcaccgtcgaatcattttgccggcgctggtttgcgccgccttgctcgcctctccggcgatggccaccacttatccgctgacgctgaccgacacgtccggccagacgatcaccctccagcaagagccgaaacgcatcgtggtgcaggacgggcgcgacattctcacgctggcgctgctcgatcgcgccaatccgttcggccggctggtggcctggaataacctgctgaagaaaagcgatgcggcgacctgggatatcttgcagagcaaatggccgggggcgaaaaacatcatcgatatgggattcagcgataagggtgaagtgaacctggagagcgtgatcgccaagcggcccgatctgatgatcgcccagctgcgttccaagccttcgctgagccaaaccggcgtgctggataagctgaaggcgctgaacgtgccggtgctgttcatcgataccatgctcaagccggtggaaaacacgccgaaaagcgtgacgctgctgggggaaaccctcaaccgcgaaagcgaagccaagcaatataccgattattatcagcagcattatcaggccattctggccaaaacgcaggcggtggcacccaaaccgcgggtgtttttcgaagccaaggctggcctgaatgggctggagtcctgctgcttcacccatgcgcacgtcggctggggggcgctggtcgaggcggtcggcgcgcgcaacatcggctctgcgctgttgccgggcgcgaccggcgacgtggcgctggaaaaagtgatcgccatgaaaccggacgcctacatcgtttccggctcacagtgggccagcaagaccaacgccgcggtgccgttcggctatggcgtgacgcagcaacaggtggatgaggctttcaaccgcatgaaacagcgcccgggcttcgcgcaggtgtcggcggtgaaagaggggcggttctacggcatctaccataatttctacaaccatccgtacaacatcgtggggctggagtatctggcgaagtttatctacccggcgcagttcccggatctggatccggccaagacctacagcgagatcctcagccgctttaccgaagtgccggaaggcaagggcattttgggcgcgcaggcgccgatggggaaataacggcaacgggcgcgacgatcgcgcccgttttgtgtgatcaggcggccggcgtataggtggagatgatctccagcacgccgttgataatgaactgtacccccatgcacaccagcaggaagcccatcaggcgcgagatcgcctcgatgccgcttttccctaccaggcgcatgatggcgccggagctgagcaggcagccccacaggatcaccgcgaccgtcaggaagatggcgaccggcgccacggccagcacccagggttcaaaacccagcgtgttcgctttgacgctcgacgccgagctgatgatcatcgcgatggtgcccggcccggcggtgctcggcatggccaacggcacgaaggcgatgttggccgatgtcttgtggcgcagctcgtgcgacttgctctccacctccggcgcctcatcggcgctttgttgcgggaacagcatgcggaaaccgatgaaggcgacgatcaggccgccggcgatgcgcaggccggggatcgaaataccgaaagtgttcatcaccacctgcccggcgtaaaacgccaccgtcatgatgcagaacacataaaccgaggccatcagcgactgctgattgcgctcttcgcgcgtcatattaccggacaaaccgagcagcaacgccaccgtggtcagcgggttggccagcggcaacagcagcaccaaacccagtccgatggcctggaataactgcaaaatacccgtcataaagtagactccctgtgcaacgttcaggccgccaagcggcggcctacgagctaaacagcctagcctgccgcgtgcctggcggcaatggggatagctcgtaacgttaattaaccgtcggccggcgtttcatcattgccgttgcactcgccggcgagctcaggttcatcctcacatcccaacggggcgtcgttgaccgcaatcgcccgcggcgccgaacgcgcaccaaaatgcatcagcccctataacgtcgttaataccgcgcacccatgatgagcgcaggctgaaaaacgagcggcgctcagaaaaaatgcacaatttttgtgttttatggcctttttcgccgcaattggccggtaaaggccgacgttcagcaccaattgctacaccccgcaggctcagctgcctaccataggcgcgctttaaaacgataatgagattgattatgcaagacgagttgaaacttttactggggaaaatcagcgcattcgcgctttccgccgccttcatggcggcattggtcggcctggtgtttatcgatgtgcactggttgcataacttcgtgcatgaaacctcgctgaccgaagcggcgcaggaactgttgctgctcgccatcgccggcggttttttcgccgcggcctggcggcaggcggaacgccgctccgcctggatgctggtcggcggcttctttctctgcatgctgatccgcgagatggacttcgccttcgatgcgttgtggcacggcgcctgggtgtggttcgcgctggcggtcgccttggtctgtctgtgccatgccgccaggcacattgcggcgacggtgcgcggcctggcctatttcgcgacgcatcccggctacggcatgatgtgcgcgggcctgctgtgcattctggtgttttcacgcctgttcggcatgagcgcgctgtggcaaacgctgatgctggacggctacaaccgggtggtgaaaaacatggtggaagagggttgcgaactgctgggctacggcctgtgcctgctggccgcattaagttatttgaaagcccccctgacgtcgcaaaaaagagaagcgctagctgaaaaatcatgatgttataacggatatattagcctgtttttcaggtaagttcgcgacctccttcagccccgcattcgcggggtttttttacgttgtttgagaatgggcacaatagcgaccatttgggctcgggttcgcggattggtatagttacggtactgtatataaatacagttttattggcttgttgtgttggaaagtggcagtaataaacaataggtcattgatatttaaattcatttaaacttaaggaacatttatgagtgatgaatacgccgccgccgtgactgaagtcgaaagctttgaacgcctgcgccaattggcgccgacggccgaaggtgagaaaatcaagctgcgcagttggcatacagataaagaccttggcggcggcgagtttgttggacacttgggcaacgcgagcgatgatggcggcattattgccgcaggcaacggttactattggaagcgcattctggaaaatgaagtgcacgccaatatgttcggcgccttgccggcttccgtggatagtcaatacgactccgcgccggcgttccgcgccgcggttgcggcggtcaaaattcataaccgcagcaagctttactacgaaggcaactataacctcaaatccgtcggcccaacggtatatgagctgccgtatgacgacggtaccgtttcccctaattttaaagccaagggggaagttgacatcgatccggaagagattcatacgatgccgatcgttttggatattccgagctatgtggtgttggaagggctgggcaatatcagttcagcgttgatcttcacctggcggcgcggcgaaggtccgatcgacacgcagcaggcgatcggcatctgttggcgcgttgcgggttatcccgccaaagaccgcatgacggacatggttcgcggcgttgggttggttaacacatccatttcttctgcctttatcggttgcctggcggacggcgttttgttctaccggatcaatttccgcgacctgattttcaataactgtggcttgccgttcatcgcgcagggctcggatgccgtgacgttcgccggttccacctctctggagtcatgcatggcgggcatcatcattggcgggatgtggctgacgcgcaacgatacctgggtgggcggcaagtgggtaccaccttatgccgacgacaccgacgtttatgccatgggctggtgcgactacaccacctttgaattcctgagcggttcttatccttcccctggctatacgccgcgccataaggtgcttgatgagtttttcaatacctacttctacaaatcagccaactccgagccagtggcgaagggcgggcgtttaaccgccacggatttccagggtatcgtgtcggactataatggaaaggatccgtatcgcggcgtggcggggcgtttcttcatcaacttctctcgttacaaacgcggcaactgcaacgtgcagattaaggacatgaaggtttatggcccaccgcgcgtaccggtttatacgccacgcattcaggggcaagattattacggcactatcgagaatgcctacatcgaacgcgttggttttatcgaacataccaagccctggagcgatgcgaacgatttctacaagagcctggatacctttaacccggattataaaacatgcccgaacctggtcgctgaaggggtgattggcgcgcgcaaagttactttgcagggtacgccatatcggccgacatcccaggggatggcccacagcaatacccgccagcattttaacatttggaccgatgatctggagaagtggaaagagaacacgagcagctctgccgtgattaacgattgcctggtttatgacaacaatggcaaagggtggtgggtctggcgtaattttatggatcgagtgtttactcgtccgctgattttcaacgaggatgatgtcggcaaactggagaaggcgtttaagtggcgcgtagaccagttggtgctcagtttgaaatccgccggcgcgacggtggcgtcgatcaatgcgaacgcacaatggtttagcgggttgggctacattagcgtggagatccctattcccgacaacgccgccagtgataacggcatgctgtccgttacctggctgcctaagattgatccggactcgccgacgggtatcaagggcacgacgtccatggtatcgggttacagcatcgtcacaaccgagaatatcgacgtcaagaatggcgccggcacggttgttggcagctttagccagaaaaaagaagtcaaaggcgtcaccatgaacaatcagcagctctacctgcattcggatcgcgagtgcagcgatgcggcgcgattgaaaatgagtgacttcaaacccggcagcagcattacggttcagatctgcttcccggccaagtttaactggtattgatttttgcaagcgctttagttttagagggaggggaggctcctccctttcttatcaggctttacgcccattcagcgaatttttgctcaatcctttggtggaagatggcctttctaaagtgataaactcattatcccgttatgacgtaacaacatagtacatttgaaactgtgtctctatgcgtgtacatatctggcagggtaaagctggatagcgtcgataacatcttgtagttaaacaacattgtatttcttcatgtgatctgtcgtgtgggtcaccactgtagataaggaattattaatgcctgttattactcttcctgacggtagtcagcgtcatttcgaccaccccgtttccccgatggatgtcgcgcgcgatatcggccctggcctggcgaaagcctgtatcgccggtcgcgtcaatggcgaactggttgatgccagcgatctgatcgaatcggatgcgcagctggccatcatcaccatcaaagacgaagacggtctggaaatcatgcgccactcctgcgcgcacctgctgggtcatgcgatcaagcagctgtggccggataccaaaatggcgatcggtcctgttatcgacaacggtttctattatgacgtggatatcgaccgcaccctgacgcaggaagacctggatctgctggaaaagcggatgcacgagttggccgataaggattacgacgtcatcaagaagaaggtcagctggcaagaagcccgcgacaccttcgctgagcgcggcgaaatctataaagtggcgatcctggatgagaacatcagccatgacgatcgtcctggcctgtatcaccacgaagaatacatcgacatgtgccgcggcccgcacgtgccgaacatgcgtttctgccaccatttcaagctgcagaaaacctccggcgcttactggcgcggtgacagcaaaaacaaaatgctgcagcgaatctacggcaccgcctgggcagacaagaagcagctgaacgcctacctgcaacgcctggaagaggcggccaagcgcgatcaccgcaagatcggcaaacagctcgatctgtatcacatgcaggaagaagcgccgggcatggtgttctggcacaacgacggttggactatcttccgcgagctggaagccttcgtgcgcatgaagctcaaagagtaccagtaccaggaagtgaaaggtccgtttatgatggaccgcgtgctgtgggaaaaaaccggccactgggaaaactacaaagacgccatgttcaccaccgcgtcggaaaaccgcgaatactgcatcaagccgatgaactgcccgggtcacgtgcagatcttcaaccagggcctgaagtcgtaccgcgatttgccgctgcgcatgggcgaatttggcagctgccaccgcaacgagccttcgggttccctgcacggcctgatgcgcgtgcgcggcttcacgcaggatgacgcccacatcttctgtaccgaagagcaggtgcgcgccgaagtgaacgaatgcattcgcatggtctatgacgtgtacggcaccttcggcttcgacaagatcgccgtcaagctgtccactcgtccggaaaaacgcatcggtaccgacgacatgtggacccgtgcggaagaagacctggccgccgcgctgaccgagaacggcattccgttcgagtaccagccgggcgagggcgccttctacggaccgaaaattgaatttaccctgcatgattgtttggatcgcgcatggcaatgtggtaccgtgcagctcgatttcttcttgccgggccgtttgggcgcctcgtacgttggcgaaaacaacgatcgcgtcgtgccggtaatgattcaccgcgccattttgggctccatggaacgcttcatcggtatccttaccgaagaatacgccgggttctacccgacctggatcgctccggtgcaggtggtggtgatgaatatcaccgacagccagtctgattacgtccagcaattgaccaaaaaactgcaggatgcaggtattcgcgtgaaagcggacttgagaaatgagaagattggctttaaaattcgcgaacatactttacgtcgagtcccttacatgttggtgtgcggcgacaaagaggtcgaagccggcaaagttgccgttcgtacccgccgtggcaaagacctgggaagcctggacgtaaacgaagtcgtagacaagctgctgaaagagattcgcagccgtagtcttcatcaactggaggaataaagtattaaaggcggaaaacgagttcaaccggcgcgtcctaatcgcattaacagagaaattcgcgcgcaagaagttcgcctaaccggcgtcgatggcgagcagattggtattgtcagtctgaatgaagctcttgaaaaagctgaggaagcgggcgttgatttagtagaaatcagcccaaatgccgaaccgccagtttgccgaatcatggattacggcaaattcctctacgagaagagcaagtcgacgaaagaacagaagaagaagcaaaaagttattcaggtcaaggaaatcaaattccgtcctggcaccgatgatggcgactatcaggtcaaactacgcaacctgattcgctttctggaagatggcgataaagccaaaatcaccctgcgtttccgtgggcgtgagatggcgcaccagcagatcggtatggaagtgcttaaccgcgtccgtaaagacctgtgtgaagatatggatctggcagtggtcgaatccttccctacgaagatcgaaggccgccagatgattatggtgctcgctcctaagaagaaacagtaaggcttacaagtaatggaacccgcgcggcgcttgcgctgtgtgggttttattcgcccaactgattcgttgtttaacaatgcgaagtggatttaattaaaatgccaaagattaaaactgtacgtggtgcagccaagcgcttcaaaaaaaccggcagcggtggttttaagcgtaaacatgccaacctgcgtcatattctgaccaaaaaagcaaccaagcgtaaacgtcacctgcgtccgaaaggcatggtgtctaaaaacgatctggtcctggttaccgcgtgcctgccgtacgcataagccattttttttgaatttagaataagactttaggagagagcatatggctcgcgtaaaacgtggtgtaattgcacgcgcacgtcacaagaaaatcatgaagcaggcgaaaggttactacggtgcccgttcgcgcgtatatcgtgttgccttccaggcagtaatcaaagcaggtcagtatgcttaccgtgaccgtcgtcaacgtaagcgtcagttccgtcagctgtggattgcacgtatcaacgcagctgctcgtcagaacggtctgtcttacagcaagttcatcaacggcctgaaaaaagcctcgattgaaattgaccgtaagatcctggctgacatcgcagtcttcgacaaagtggccttcggcgcactggttgagaaagcgaaagcagctctggcgtaagtcagtagaagagggagcttgctccctcttttaatctttgttttcagcgacaaatattgactttcattggccgccgctatatcactggtggacaatcatcgacaaggtaccgcaatcatgcacgcagctctttttcgtttctttttttactttagcgcctgatttcaggaggctttgcgcgtaagaaaagaaacgaaaagtagcgcctaagcctccctcgtggaggcttttttgtttttggccatcgtctcgccttgccaggcgttgcggtgagggcggcagacgcaacgcgggccatgcgccgcgcaggcgagccggccggccggcaacgtattgaaaagtctttgaataatggtcaaaggcgtgttcgaatatagataacaattacttagggccattccggccagaggaagaggaaagcaatgccacatctcgcagagctggttgccaatgccaaggcagccgtagaagatgcccaggatgttgccgcgttagatttggtgcgcgtcgaatattttggcaagaaaggtcatttcaccttgcagatgcagtctctgcgtgacgtaccggcggaagaccgtccggcggccggcgcggtgatcaaccaggccaagcaagaagtacaggacgcgctgaacgcgcgtaagaacgcgctggaaagcgccgcgctgaacgcgcgcctggcggctgaaaccatcgacgtttccctgccgggccgtcgcatggagaacggcggcctgcatccggtgacccgcaccatcgaccgtatcgaaaccttcttcggcgagttgggcttttccgttgccaccggcccggagattgaagacgattaccataacttcgacgcgctgaacattccagggcatcacccggcgcgcgccgaccacgataccttctggttcgacgccacacgcctgctgcgcacccagacttccggcgtgcagatccgcaccatgaagaaccaacagccgccgatccgtatcattgcgccgggccgcgtttaccgtaacgactacgatcagactcacaccccgatgttccaccagatggaagggctgatcgtcgataaagacatcagcttcaccaacctgaagggcacgctgcacgatttcctgaacaacttctttgaagaagacctgcaggttcgtttccgtccgtcctacttcccattcaccgagccgtccgctgaagtggacgtgatgggcaagaacggcaagtggctggaagtgctgggctgcggcatggtgcatccgaacgtgctgcgcaacgtcggcatcgatccggaagtttactccggcttcgccttcggcatgggcatggagcgcctgacgatgctgcgttacggcgtcaccgacctgcgcgcattcttcgaaaacgatctgcgtttcctcaaacagtttaagtaaggcgggaatatcacatgaaattcagtgaactctggttgcgcgagtgggtaaacccggccatcagcagcgaagcattatccgatcaaatcaccatggccggcctggaagtggacggcgtggatccggttgccggcgcgtttaacggcgttgtggtgggtgaagtggtcgagtgcggtcagcacccgaacgccgacaaactgcgcgtcaccaaggtcaacgttggcggcgaccgcttgctcgacatcgtttgcggcgcgccgaactgccgtaccggcctgaaagtggcggtcgccaccgtgggcgcggtgctgccgggcgatttcaaaatcaaagccgccaagctgcgcggcgagccttcggaaggcatgctgtgctcgttctccgagctgggcatttccgacgatcatgacggcatcatcgagttgccgctggatgcgccgatcggcaccgacatccgtgactacctgaaactgaacgacaacaccatcgagatcagcgttaccccgaaccgcgccgactgcctgggtatcatcggcgtcgcgcgcgacgtgggcgtactgaaccaggtggcgctgaccgagccagacatgagcccggtggccgctgcgattgacgccacgctgccgatccgtgttgacgcgccgcaggcgtgcccgcgctatctgggccgcgtggtgaaaggcatcgacgtcaaggcgccaagcccgctgtggatgcgtgaaaaactgcgtcgctgcggtatccgctccatcgatgcggtggttgacgtcaccaactatgtgctgctggagcttggccagccgatgcacgctttcgatctgagccgcatcgacggcggcatcgtggtgcgcatggcggaagaaggcgaaacgctgaggctgctggacggcagtgaagccaaactgaacgccgacaccttagtgatcgccgatcatcaaaaagcgttggcgatgggcggcatcttcggtggcgagcattccggcgtcaacggggaaactcaggacgtgctgctggaatgcgccttcttcagcccgctgtcgatcaccggccgcgcgcgtcgtcacggcctgcacaccgacgcttctcaccgctatgagcgcggtgtcgatccggcgctgcagtacaaagcgatggaacgcgccacgcgcctgctgctcgatatttgcggcggtcaggcaggcccgattatcgacgtgacccacgagaacgaactgccgaagcgcgccaccatcacgctgcgccgcgagaaactggatcgcctgatcggccacgtggtgccaagcgagcaggtcagtgacattctgcgccgcctgggttgccaggtgaccgagcagggcgacagctggcaagcggtcgcgccaagctggcgtttcgatatggagatcgaagaggatctggtggaagaagtggcgcgcgtttacggctacgacaacatcccggatgtgccggtgcgcgccgatctggtgatgacccagcatcgcgaagccgatctgacgctgaagcgcgtgaagaccatgctggtcgatcacggttatcaggaagcgatcacctacagcttcgtcgatccgaaggtgcaggcgctgctgcacccgaatgaagaagcgctgatcctgccaagcccgatttcggtagaaatgtcggcgatgcgcctgtcgctgtggaccggcctgctgtctgcggtggtgtataaccagaaccgccagcagacgcgtctgcgcctgttcgaaagcggcctgcgctttgtgcctgatagtgcggcagatctgggtatccgtcaggatgtcatgctggcgggcgtgatcgccggccatacgcacgatgaacattgggatctggcgcgcaagcccgtcgacttctatgatttaaaaggggatctggagtccgtcctcgagctgaccggtaaattatccgaaattcagttccgggcggaagccaatccggccctgcatccagggcaaagtgcggcgatttatttgcacggcgaacgcgtaggtttcatcggtgtggttcacccggaacttgaacgtaaactggatcttaacggccgcaccgtggtgtttgaactggagtggaacaagcttgcgagccgcgccgtgcctcaggcgcgggagatttcgcgcttcccggcaaaccgccgtgatatcgccattgtggtggctgaaaacgtccccgcagaagatattttggccgagtgtaagaaagttggcgcaaatcaggtagttggcgtaaacttgtttgacgtgtaccgtggcaagggcgtggcagaaggtgacaagagcctggctatcagtctggtattgcaggataccgctcgtacactggaagaagaggagatagccgctaccgttgcaaaatgcgtagaggctctaaaacagcgattccaagcatccttgagggattgaacctatggcgcttactaaagctgaaatgtcagaacacctgtttgagaagcttgggcttagcaaacgggacgccaaagacctggtggaactgttctttgaagaggtccgtcgggctcttgagaatggcgaacaggtaaaactgtcgggttttggcaactttgatctgcgtgacaagaaccaacgtccggggcgtaacccgaagaccggcgaagacattccgattacggcgcgccgtgtggtgaccttccgtccggggcagaagctgaaaagccgggtagaaaacgccagcccgaaagggtgagtgacgtgacatcaaaaaaggccgcttgcgcggcctttttcttttctgagacaaaattcagtttattcctaataggcaatgcatgaattaaaattattcattaaatcgcctcggcgaaaatttatttaatctcaattacggagtattcttatatcttattttgtgtggtgagcagccatatttgttgtttcaataacggccgtaataatggccagggccgtcgccgcggtggccaccgcccccgtgcgggccccagcagcaggcgctcagggttgaggccagggctacaacggttagcagcataccaatacgtttaatcatcttataatcctccggtggaaatccatttaactataattgccgcgccgcttgagagacgtcagttattcgttaaatcttgtcagtggttatgataattaaaggtggcggcaaacagtgtagggattgtgtaaggccgtcgaaaacaatctgaaaataggcatcggtgagatagtcgttaaataagcacgctgatataaccactgcagcaagaaaatagagtgagaaggtgaaatgaaaaagatcctgttgctggtgtgtttcccgctgttgctgccgctggcggcgaaggccgatgtctccgtcgatatcaacgtgccgggcgtttctctgcatctgggggatcaggaccgtcgcggctactactgggatggctacgactggcgtccaccgcagtggtggcatgcgcaccagggccgcggcctgggtgagcgcaatgcgcgcggtatgtactgggacggcggacgctggcaaccttcgccgccgcgtggctatgagcatcgtgggccggaacgcagcggcaatccattccacggcgatcgcgatagtggcgaccacgaccgccgtcatgacgatcgcggtgaccatgaccgccgcgatggtggccgcggccaaccttatccaccgggcaacgccggcccgcatcgttaatccctgagtttatcggcggctggttttgccatcattgttgcgatgacgggcaaggccagccgctgctttcctgagccactatccacgcaagacttccccttgcggcgttaaccccctaatattcgactcaaacgtcaattatccggccacgacagcggccggcagggaaccgccgcgccatgccaaccagccgtaccttcaccttactgttgcaacatcaacgctaccgcgataaacgccagctcagtctgttggcgctgggcgtggcggtggcgttgctggtcagcctttgcgccggcgaccaatggatatggccgtcagcgtggttcagcgatcgagcgcaactgtttgtttggcaactgcgtttgccgcgcgcgctggcggtgatgctggtcggcgccgccctggcggtggcgggcgcggtgatgcaggcgctgtttgaaaatcctctggcggagcccggtctgctgggtgtcgctaacggcgccggcgtagcgctggtgctgacggtgttgttggggcacggtttgttgccggtggcgctgatgagcgccgccgcgatagccggtgcgctggcgatgaccttcttgctgctgggcttcgctcgccggcgacgtctgaccaatgcacggctgttgctggtcggcgtggcgctgggcatcgtgtgcagcgcgctgatgacctgggcggtctatttcagcaccagcctcgatctgcggcagctgatgtactggatgatgggcggtttcggcggcgtcgactggcgccaaaagtggctggtgctggcgctgctgccggtgttgctgtggctgtgtggccagggccgagcgctcaacctgatggcgctgggcgaggtgcaggcgcgccagctcgggctgtcgctgcatgtgtggcgtaacctgctggtgctggcgatcggctggctggttggcgtcagcgtggcgctcgccggggtgatcggcttcgttgggctggtgatcccgcatattttgcggctcaccggcctgacagaccagcgctatctgctgccggcctgcgcgctggcgggggccggggtgttgctggtggccgatgtgatcgcccgcgttgcgctgctggcggccgagctgccgatcggcgtggtgacagccacgctgggggcgccgctatttatctggttactgacccggacaaaaggcgtaaggtagttttcttcattcacctgccattaaaaaaccaaaggatgacaaccgatgagcaagccaatcgacaacctgccgttacaaaccatcgaaaatcagacgaccacgctgggtgcctatcagggcaaggtgctgctggtggtcaacgtggcctcggagtgcggcctgaccaagcagtacgaagggctggaagcgctgtacgaaacctatcgcgagcgggggctggaagtgctggggttcccgtccaatgaattcctgggccaggagccgggcagcaacgaagagatcctggcgttttgccgcggcaccttcggcgtgcaattcccaatgtttgccaagattgaggtgaacggcgaacaccgtcatccgctgtaccaagcgttgattgccgcacagccggaggccgtcgcgccggaaggcagcgagttcctggcgcggatgaccagcaaagggcgtgcgccgaagcatcccggcgatattctgtggaactttgagaaattccttatcgcgcgcgacggcacggtgatccagcgcttctcgccggacaccacacctgaggatccggcgctggtggcggcggtgaaacaggcgctggcagggtaatacggatgctgcaactcgttgaggttggggtggcggggcgcctggcgcctttttcggcacagattgacggcgggttgcaggttcacctgatcggcccaaatggcgcagggaagagtaccctgctggcgcgggtggcgggtatgctgccggggcggggcgaagtctgcctggacggacgcgcgctctccgattatccggggagcgagctggcgcgccgacgcggttatctcagccagcaacagccgccggtgtcgctgatgccggtgtttcagtatttggcgttgcaccggcctgccggcgcggcgcaaaccgaggtggaacacaccatcctctatctgtgccagcggttgaagctggcggataaactgtcacgcatgctgacacagctttcaggtggagaatggcaacgggtgcggctggcggcggtattgctgcaggtgtggcccagcgttaacccgcacagccgattgttgttgctggatgaaccaaccaatagcctggatgtggcgcaaaaggtcgcgctggatcgcctgctgcgcgaattctgccaaagtgggcgcagcgcgctggtgtgcgcacacgatctgaatcataccctgcagcaggccgatcgggtttggttgttgcacgctgggcagttggtcgcgcagggcatcacccgtgaggtgatggcgcccgcactgttgtcgcagatctatgaagtggatttccacctgcaatgggtggggaaccagcgttggatcatgacccgcacggcttaattcgccctggggtataaatataaacgaaaactaaacgtagtgaatataaatagccgggtaatcatcggctattattgtgctgcctctcattttctcgtgagttttcttgaaaaacgccaatgacgtgctacgcttgattcggcaaaaataaaatacgtaagtaattattaaaaaatataagaaattgatttacataataaaattaaattaatgatgacggcgccttcctatcagttctcccactgatgacaagtctcgtcttaaggtttagttaagcttgcggccttacattggcagttaatccacggaaacgattcttctctggcgtttaatattcgttaaacgaaagggatttacagtgtcatcaaaagcagttcgatacgtttggggttaactatggatcaatttttgcctttctctcgtccggccattggcgacgaagaaatcgccgcggtagagaaagtgttgcgttccggctggatcaccaccgggccgcaaaaccagcaactggaaaatgacttctgttccactttcggctgtaagcacgccatcgccgtcagttccgccaccgcgggcatgcacatcacgctgatggcgctgggcatcgggcccggcgacgaagtcatcaccccttcgcaaacctgggtttccaccctcaacatgatcgaactgctgggcgctacgccggtaatgatcgacgttgaccgtgagaccttgatggtcagcgccgccgatgtcgaggctgccatcaccccgaaaaccaaagcgattgttccagtgcattatgccggcgcccccctgcagatggacgctttgcgcgccgtggccgaacgccatcatctgccgttaatcgaagacgccgcccatgcggtcggcacgcgttacaacggcgaatgggtcggcgcgcgcggcacggcgattttctcgttccacgcgattaagaacgtgacctgcgccgaaggcggcctgatcgccaccgacgacgatgcgctggcggatcgcctgcgttgcctgaagttccacggcctggccgtcgatgccttcgatcgccagcagctgggccgcaaaccgcaggccgaagtggtggagccggggtacaaatacaacctgtccgacattcacgcggcgatcgccgtggtgcaactgtcgcgcttcgccgagctgaacgcgcgccgtaaggcgctggcgcagcgctacctgagcgcgctggaaggctcgccgttccagccgttgggcgtgccggattatccgcatgaccacgcctggcacctgtttatggtgcgcgtcgatccagcgcgttgcggtatcgatcgcgaccagctgatggagcgcctgaaagaggttggcatcggcaccgggctgcatttccgcgccgcgcacacccagaaattctaccgtgagcgctatccgcagctgtcgttgccgaataccgaatggaactcggcgcggctgtgcaccttaccgctattccctgatatgaccgacgccgacgtggatcgcgtggtcaatgccttgtcttctgttgtggagtctttacgtgtctcgcgttgaaccgattaaaaaagtgtcggtagtcattccggtatacaacgagcaggaaagcctgccggcgttgctggagcgtactactgccgcctgtaagcagttatctcaaccttatgaaatcatcctcgtcgacgatggcagcagcgacaactccgctgacatgctgaccgcggcggcggaaaagccggacagccacgtgatcgccgttttgctgaaccgcaactacggccagcactcggcgatcatggccggtttcaaccaggtgaccggcgatctggtgattacgctggacgccgatctgcagaacccgccggaggagatccctcgtttggtcagcgtggcggaagagggctatgacgtggtgggcaccgtgcgcgccaaccgtcaggactcctggttccgcaaaagtgcctcgcgcgtgatcaacatgatgattcaacgcgccaccggcaagtcgatgggggactacggctgcatgctgcgcgcctaccgtcgtcatatcgttgaggcgatgctgcactgtcatgagcgcagcacctttatcccgattctggcgaacaccttcgcccgccgtaccaccgagatcgacgtgcgccacgctgagcgcgagtttggcgactccaagtacagcctgatgaagctgatcaacctgatgtatgacctgatcacctgcctcaccactacgccgctgcgtttgctcagcgtggtcggcagcatcgtggcgctgtccgggtttgtgctggcgctggtgctgattgcactgcgtctgctgctcggccctgaatgggccgccggcggcgtgttcacccttttcgccgtcctgttcacctttatcggcgcccagtttgtcggcatggggctgttgggtgaatacatcggccgtatctataccgacgtgcgtgcgcgtcctcgctattttgttcagaaagtggtcggtgcacagcatgaccacaatactcaggaagaagaatgatgaaagctattgtatttgcttaccatgatattggctgcgcaggtctgaaagcgctgactgaggcgggttatgacgtgcaggccgtgttcacgcacaccgacgaccctggtgagaacaacttcttctcctctgtggcccgtttgggcgccgaattggatctgccggtctatgcgccggaagacgtaaatcacccgctgtgggttgatcgcattcgcgcactgcagccggacgtgatcttctcgttctactaccgccacatgctgagcgacgagatcttgtcgctggccccgttgggcggtttcaatctgcacggctcgttgctgccgcgttaccgcggccgcgcgccggtgaactgggcgctggtgaatggcgaaaccgaaaccggcgccacgctgcacaaaatggtgaaacgcccggacgccggtgacatcgtcggtcagcagaaagtgaccattgccgacagcgacaccgcgctgacgctgcacaaaaaagtgctggaagccgcgcagatcgtgttgaaagagcaactgccgaaactgaagaacggcaccgccactttcacccggcaggatgagtctcaggccagctacttcggtcgccgcaccccggcggacggtgagatcctgtggcacaaatccgccaaagagatcaacaacctggtgcgcgccgtcaccgagccgtacccgggtgccttcagccacctcggtcagcgcaagctgatcgtctggcgctctcgcgtgctggacacccaacacgataaacagccgggcaccgtgctgagcacctcgccgctggtcatcgcctgtggcgaaggtgcgctggaaatcgtcgccgggcagaatgacagcggtctgtacgtgcagggcagccgcctggcgcaggaaatgggcatcgtcaccgacgtgcgtctggccgccaagcccaacgccgtgatgaaacgccgcacccgcgtgctgatcctcggggttaacggcttcatcggcaaccacctgaccgagcgcctgctgcgcgatgaccgttacgacatctacggtctggatatcggttccgacgccatcagccgcttcctcgacaacccgcgtttccactttgtggaaggcgacatcagcatccactccgagtggatcgagtatcacatcaagaaatgcgacgtggtgctgccgctggtggcgatcgcgacgccgatcgaatacacccgtaacccgctgcgcgtgttcgagctggacttcgaagagaacctgaagatcgttcgcgactgcgtgaaatacaacaagcgcatcatcttcccgtccacatctgaagtgtacggcatgtgcgacgataaagagttcgacgaagaccattcgcgtcttatcgtcgggccaatcaacaaacaacgctggatctactcggtctccaaacagctgctggatcgggtgatctgggcttacggcgccaaagaaggcctgaagttcacgctgttccgtccgttcaactggatggggccgcgcctggataacctggacgctgcgcgcatcggctcttcccgcgccatcacccagctgatcctcaacctggtggaaggttcgccgatcaaactgatggacggcggcgcgcagaaacgttgcttcaccgacatcaacgacggcatcgaagcgctgttccgcatcattgagaaccgcgacggcctgtgcgacggccagatcgtcaacatcggcaacccgaccaacgaagcgagcattcgcgagctggcggaaatgctgctggaaagcttcaacaaccacccgttgcgcgatcgcttcccgccgtttgccggcttcaaggacgtagagagcagcagctactacggcaaaggttaccaggacgtcgagcaccgcacgccgagcatcaaaaacgctcaccgcctgctgggttggcagccgaccatcgagatgaagcaaaccgtcgccgatacgctggactacttcctgcgcacaaccgttcaggaagggaacggtgcatgaagaaagtcggtctgcgggttgatgtagataccttcagcggcacccgtgaaggggtgccgcagttgctggacctgttcgaaaagtacgacattcaggccagcttcttcttcagcgtgggaccggacaacatggggcgccatctttggcgccttttgcgtccgaaatttctgtggaaaatgctgcgttcgaacgccgcctcgctgtacggcctggatattctgctggccggcaccgcctggccggggcgcaatatttcgcgcgcgttggggccgctgatgaagcgcaccgccgaagccggccatgaagtcgggctgcacgcctgggatcaccagggctggcaggccaaggtcggcaagtggagcgaggcgcagctgaccgaacaggtgcagcgaggcgtcgatgccctgagcgccagcaccggccagccggtgaaatgctccgccgtggcggggtggcgtgccgacacgcgcgtgctggaggtcaagcagcgcttcggcttccattacaacagcgattgccgcggcacccatccgttccgtccggtgttgagcgacgggcgtcacggtacggtgcagatcccggtgacgttgccgaccttcgatgaagtgattggcagcgaagtcagcatggccgacttcaacgactacattctacgcgccatcgagaacgatcgcggcgtaccggtgtacaccattcacaccgaagtggaaggcatgtcgcaagcggcgatgttcgaacagttattgcaacgcgcacggcagcagggcatcgaattctgcccgctgagcgcgctgttaccgcaagatttggcgtcactgccgttgggccgcatcaagcgcgctcctttccccggccgcgaaggttggctgggctgtcaaaccgatgtgaaggacgttacatgaaggcgctaaaaggatcctgggccattctgctggccgttttttttgctctggtctatctgatcccgcttaacggtcgcctgctgtggcagccggatgaaacgcgttatgccgagatcagccgtgagatgctgcaacgcggcgattgggtggtgccgcacctgctggggctgcgctatttcgagaagccggtagcgggttactggttcaataacatcagccaatggctgttcggcgaaaacaactttgcggtgcgcttcggctcggtgttcagcaccggcatgaccgcgctgctggtgttcgcgctggcgatgctgatgtggcgcaatgcgcggcgcgccagcctggcggcgctgatgttcctgtcgatggtgctggtgttcagcatcggcacttacagcgtgttggatccgatgatttcgctgtggctggcggcggcgatggtcagctattacctgacgctgaaggcctcctcggtcaagggcaagctgggcgcttacgccttgctgggcctggcctgcggcatgggctttatgaccaagggcttcctggcgctggcggtgccggtgatcgcggttatcccgattgtcattcagcaacgccgcatcaaggatctgctgtgctatggcccggtggcgatcgtgaccgctacgctgctcagcctgccgtgggcgctggcgatcgcgcaacgcgaacccgatttctggaattatttcttctgggtcgagcatattcagcgtttcgccgaagataatgcccagcacaaggcgccgttctggtattacctgccggttctgctggcggcggtgctgccttggctggcgctgctgcccggcgcgctgctcaaaggttggcgcgagcgcgtacagcgtccggagctgttcttcctgctgagctgggcgctgatgccgctgatcttcttcagcatcgccaaaggcaagctgccgacctacattctgccgtgcatggcgccgctggcgctgctgatgaccgcctatgcggaagactatgccgccacgctgcgcgccaggctgttcaaggccaacgcctggttgaacggcctgttcgggctgattggcatcgtggcgctggtggtgttgagctccggtctgctgccgaaagcgcatctgtttactccccaggagtggccgaaagtggtgctcggcctgatcgccttcggcggctggctgctgttcgcactggtttctgcgcgcgataacggccgccaatggcgctgggcggcggcttgcccggtgctgctgtgcctggtgatcggttacgccattcctcaacaggtgaccgattccaaactgccgcaaaacttcgcccgcgccacgatggccgaactgagcgacagccgttatgtgttgagcgacagcgtcggattggcggccggcctggcctgggaactgaagcgcagcgacgtgctgatgtacagccagaaaggcgaggtggcctatggtctggagtatccggacgccaaggggcacctgatcagcgacgccgacttcccgcagtggctggcgcaggcgcgcaagcagggcaatgtgtcgctggtgttgcagctctcccgcggcgaagccctgccgcaggagctgccggccgcagacaaggtggatcgcatgaaccgcttggtgctgatgtggtataaacagcaaccatgatcggttttttgttggtgatagtggtcagcctgctcacctgtggtgggcagctgtgccagaaacaggcggcgcactgctgggaacgggcggacgaggcgcggctgaaacagacgctgcgctggttggcgctggcggtgttgctgttggggctgggcatggcggtgtggctcaatgtgctgcaacgcctgccgctcagcctggcttacccgatgctcagcctgaacttcgtaatggtgacgctggcggcgcgctggctgtttcatgagccgacaaccgttcgccactggtgcggcgtggcgtcgattatgctggggatcctgctgatgagcgtgcattcatgaggggctatgcctggggcgccgccagcgtgttgctggtgacgctggcgcagttgctgatgaagtggggcatggtgcaaatcccgctgatgtcgttcgccgacgtctcgttggcgctgatcggcgactactggctgccgctgctggcggtgggcggtggcatcttcggttatgcgctgtcgatgctgtgttggttctttgcgctgcgccatctgccgttaaaccgcgcttatcctctgctgagcatcagctatgcgttggtttacctggcggcggtgatcctgccgtggtttaacgaatccgctacgctgctgaaaacgttgggcacgctgtttattctgttcggcgtctggctgattaacagcaaatccgagaccaaatcgccgcaatagggccaaaaccggcgatcctgctattatctccctcatggcgcttgcctttttccccgtgcgggagataaattaacgcgaaatagcgctctccttacgtggtgccggctttgcctcgcaggcagtgtagtggtgtaccgaatggcataatgcggcaacgtgttcaatgaagggatattatgcggatgcgtgtgtggtttttattagccagtttaatcctcgccggttgcagcagccatgcgccgccacccagcggccgcctggcggattctatcgtggtggtagcccagctcaatgaacaattgcgccagtggtacggcacgccataccgttacggcggcctggatcgcggcggcgtggattgctccgggtttgtttaccgcacgttccgcgatcgcttcgacatgcaactgccgcgttcgaccgaagaacaaacctcactgggcaccaaggtttcacgcgatgagctgatgccgggcgatctggtgtttttcaaaaccggcggcggtgagaacggcctgcacgtcggcatttacgataccaacgaccaatttatccatgcgtcgaccagccgcggggtgatccgctcctcgctcgataacgtctactggaagcgggtgtactggcaggcgcggcgcatttagccttaacccgttgatttggtgtatcatggcggcatcacgtgttttgaacggtgcctgccatgaacagtttgcgtttactgatctccgactcctacgatccctggttcaacctggcggtggaagagtgcatcttccgcgaaatgaccacgcaaaaaatcctcttcctgtggcgcaatgccgaaacggtggtgattggccagtcgcagaacccctggaaagagtgcaatacccggcgtatggagcaggacggcattcggttggcgcggcgcagcagcggcggcggggcggtatttcacgatctgggcaatacctgcttcacctttatggccggcaaaccgggctacgacaagagcgtctcgaccgacatcattctgcaagcgctgcggcagttgggcgtcacagccggcgcgtcggggcgcaacgatctggtgatggaaaccgccgacgggccgcgcaaaatatccggctcggcctatcgagaaacgcaggatcgcggtttccaccatggcacgctgctgctgaatgccgatctggagcggctggcggactacctgaacccggatcccaaaaagctgcaggccaagggtatcacttcggtgcgttcgcgcgtcgccaacctggcggagtttttgccgggcatcagccatgagcaggtatgcgacgctatcgtgcaggccttcttcgcccactatggcgaaacggccgagccggagatcatttcgccggatgtattccccgatctgcccgattttgccgcgcagttcgccaaacagagcagttgggaatggaattttggcaaggcgccggcgttcagccacttgctcaacgagcgttttgtctggggcggcgtagacctgttcttcgatgtggagaagggggcgatcgttcgcgcgcaggtattctccgacagcctgaatcccgccccgctgcagcggttggcggagatgctggtaggctgtgcgtatcgaagcgagcccgttgccgcttgctgtgaccggctgatggcggactatcctcagcaggcggccgaattaaccgagctgcggcaatggctgagcgaaacgatccgctagcgcaggcctgatgatgaagggatgagcgtgctcatccctttttttatcgctgaaatcgacgttttgcatggtggtagcgcagattttctgaaaatcaaggtgggcatttttttacgttttcaatgccgcgaataacgggcggaattgatgcgttattaaatttaatcagtcgtcgttaacggcagggaaaattggcgttaagaaggaaagattattttactttatttaggatttttcttaaataaaacaaaggagataagtcaaatttagtcataaatccattcaacttaagtcaaataccttttcgcataacgcgtttggcggctaccttggcataagtccggctgcttttctttgcgccttttacgattgtcgtatagctttaatctatcaattaaatgatatttcatgggtatttacattgatatttccgattaatcccagagggattgatcgataaaatgtattgatatacgatgatacgctagccattcatcctgtggcattaaaatgaacatccaactcgaagctgactttattagtagctatgtttttcaacctgtttactcaatggagggcgggctgttggcggtggaaatgttgagccgtttcaacagtctcgacggtgatttagccatgccggccgaaattgggattaatttattggcgcctgaacaaaggattgagttatttaatgagcaactgaaacttgcggagcagcatgcggcttggtttaccgataacaacgtacagttgaccatcaatatcgaagaaaccatcgttgagcttattctttccgattcggcgttgtgccaaaggatcgggcaatatccttttattgcatttgaaatgagtgagagttttccgaatctttcggccggtaagaacaacccgagcgtgcggcgattaagcgaaatgtttacgctgtggctcgatgatttcggttccggtaaggccacgttgaccgcgttgtacgatggtttgtttgactacgtaaagatagacaaacgtttttactggcagctgtttacccatcaggggtatgacgtggtcatcgactcgttgttaaagaatatcaacctgttgtgtaaaggcgtgatcgtcggaggaatagagaaaaaagagtactttaataaactcagatacgccggtgttttaggcctgcaaggttttttatggcccagcgttggtgtggataatctgcaagctttgctgacgatgcccagcgagttcaataattaagaagtgatacaaaaaaactacacacaatgaggtaaataagcgccggggtgatgtttagcgtgattcagtcgccgttattcccccacgtttttgctgataaccgcgtttgtcagccgacgttcagcgcgtttcctcacgcgaaacctcccgcatccgttctggcgacaggcggatgcgttctccctgcattccttcggtgttaatcctcccgttcaggctctacactacgctgaaacggagggcctatgccgcagttcgataacgcttactaccaacaactacctggtttctacaccgctctgaatccgacgccgctcaaggatacgcgcctgctgtaccatagcgagccgctggcgcgcgagctggggctggatgaaagttggtttactcaggataaaaccccgatttgggcgggagaaacgctgctgccgggcatgcagccgctggcgcaggtgtacagtggccaccagttcggcgtgtgggccgggcaactgggcgatggccgcggcattttgctgggcgaacaggtcatggcggacggcagccaccgcgactggcacctgaagggcgccgggctgacgccgtattcacgcatgggtgatggtcgcgcggtgctgcgttcggttgtccgcgagtttctggcctctgaggcgttgcaccatctggggatccccaccacgcgtgcgttaactattgtcaccagtcaacaaccggtatatcgcgagcagccggaacgcggcgcgatgctgctgcgggtggcggaaagccatgtgcgcttcggccacttcgaacacttttactaccgcaaacagccggagcaggtgcggcagctggcggatttcgtcatcgcccgtcactggccgcagttgcaggatcaggccgatcgttacctgttgtggtttaccgacgtggtcgaacgtacggcgcgcctgatcgcccattggcaaaccgtcggattcgcccacggcgtgatgaacaccgacaacatgtcgattctcggcatcaccatcgattacggcccctacggcttcctcgatgactaccagcccggctatatctgtaaccactccgaccatcaggggcgctacgctttcgacaatcaaccggcggtggcgctgtggaacctgcatcgcctggcgcagaccctgtcggggctgatgaccaccgaacagctgcagcaggcgctggcggcgtatgagccggcgctgatgcgcgcctacggtgaacagatgcgcgccaaactcggcttcttcacgccgacggcgcaggataatgacgtgctcaccggtctgttgagcctgatggcgcaggaagggcgggactatacccgcacgttccgcctgttgagcgacactgaacagcaacaggcgcagtcgccgctgcgcgacgagtttatcgaccgcgcggcgttcgatgcctggtatcagcagtatcgcaggcgtctgcagcaggaacaggtgagtgatgcggaacggcaacgggcgatgaaggcggtgaacccgcgcctgatcctgcgcaactatctggcgcagcaggcgattgaggacgcagagaaagacgacgtgggccgtttgcagcggttgcatcaggccctgctgcggccgttcgacgatgcgccggagtatgacgatctcgccgcgctgccgccggactggggcaaacatttggagatttcctgctccagctgagatgaaaaagggcgcctcatggcgcccttgatgttattgacgtagatagacctgcggcagcgacgcttcgggatgatgcaccacgccgagatcggcctgataccagcgggtgagaatgtcggcctgcagcacttcctgcggcgtgccgctcgccaccaagcggccctgatgcaacagcaggatccgatcggcgtacagcgcggccagattgagatcgtgcagcacgcagcagacgcccagcggctgttggcgcgtcagcgagcgcagcaggcgcagggtgtgctgctggtgatacaggtccagcgccgaggtcggctcgtcgaggaacagccaggcgggggacggttgcggctgccacagctgcgccaacacccgcgccagctgcacccgttgttgttcgccgccggaaagctgacggtagtcgcgctgcgccagcgccaggcagtcggtttgttccatcacctgttggagcgcctgatgctcgtcgcgtttgccgtgcggcgcccgccccatgctgaccacttcttccacgctgaagggaaacgccagatcgctgtactggcgcatcacggcccggactttggccaactgctgcggcgcccagtgttccagcgggcggtcgagcagccggcattcgccacagtccggcgtcagatagccggtcagcaagcgcaacagcgtcgattttccggcgccgttagggccgataatcgccaccatctcaccgccggcgaggctgagtgaaacgtcgttgatcaggcggcgcgtaccgaggctgtagcgcagctctcgggccgtcaggcaggcggcgttatccaccggttcgctcccgctggcgcatcaccagccacaagaagtaaggaccgccgatcaggctggtcatcaaccccaccggcatttcggccggcgccaccagcgtgcgcgccagcgtatcgctgaccagcaacaggcaggcgccgcccagcgcggagcagggcagcagccagcggtgatcgccgccgaggcgcatgcgaaccagatggggcaccaccagaccgacgaagccgatcacgccgctcatcgccaccgccgcgccgatcagcagggcgctcagcaacagcagctgcagcttggcgcgctgtacgttcaccccgaggtagtgggcctcttcatcccccagctgcaacaggttcagccggcgcgcctgcagcagcgtcagcagcgccgtaggcaaaatcagcgaggcggaaaccgccagcgtcggccactgcgactggctgaggctgcccatcatccacagcgagaactggcgcagctgttgatcgctgctgacgtaggagagcacgccgatggccgccatgcacagggcgttgatggcgatgcccgccagcagcagtcgcgacagattgccgtgcccgctgcggctgatgccgtagatcaataacgataccagcaggctgccgaggaacgccgccagcatatggccgtacagcgcgatcgtcaccggcaacgccagcggcatcacgatgaacagcgcgacaaacagcgcgccgccgctgctgatgcccagcaggctaggatccgccagcggattgcggaacagcccctgcatcacggcgccggacaccgccagcgcgcagccgatcaccaccgccagcagcacgcgcggcaggcggatattcagccagatgtgccaggcggcatcgctgaacggttcgcgccacagggtccgaaacgacagcgtcagcgcgccgagattagcggcgaccagcgccagcagcgtcagcagcaccagcagaccgatgatggcccactgaggcgaggtgcggcagcgcattacttttgctccgccgcgtggcgcagcttggccagcgccgccggcgtttccagaccgaagcccagcagcgccatgtcatcgacgatcagcacgcgccgctgtttgcccgctggcgtcagcgccaggcccggcagcgtccacagctgctgttcgccgccgagggtgcgcacgccgtcggtggtgaccagcaacagatccggcgcgctggcgatgacaccttcctgcgacagcgggcggtagcggtcaaagccctgcatggcgtttttcaggccggcggcggcgatcaccgcgtcggcggcggtgtgttgcccggccgccatcggtgtaatgccgccgtggctcatgacaaacaacaccttcaccggcagcggagaggtgtcgaccgccgccagctgttgttgatagcgctcgctcagctgtttgccttgctcaacgcgttgcaacgcggcggcgatcgcggcgatcttctgcggcaccgcctgcagggtggtgtcacccggcacgctgaccactttgacgccgctgtccgccagctgtttgagcaccagcgccggctgtgccagctcggtcgtcagcaccagcgtcggcttcagcgccagaatgccttcggcgttcagctggcgcatatagccgacgtccggcagctttttcaccgcttccgggtgcaggctggtgctatcgcgggcgatcacgtcgtcgccggcgccgagcgcaaaggcgatttccgtcacgtcgccgccgatcgagacgatgcgctgtgccgccgcggcggtgagcggcagcgccagcgtcatcatcagcgccaggcggcggattaaggaagatttcatgcggcgatgtccttggcggcgagcgcggcaacctgctcgcgccactgggtttgttccggctgaccttcggtacgctggccatacagctgcgcaatctgcgtgccgtcggcggcgaacagctccaggctggtgacgatgccgtccttggtcggtttgcgggtgatccagctttcggcgatggcgccttcaatcagatgcagcgtgaagcggcgattgaacacgttgatccaaccttcctgcggcatcaaacgttcgatctggccggtgaaaatctgcacgcagccgcggttgccgacgaatatcatgatctcgttttgctgctgctgcgccgcttccagcagctgcgacagcgcgctgttgtccacctgataggccagatcgtcgccgacggcgcggaaggcctgctggcgcgtgagtttattgcggctcagcagctggaagaactggtgaacgtcggtcatcgcgcgccattcagcgtcgattttggcatgatcctgcgtcgtttcatccgaggtgctcgcctcggcgggctgcagggccagcgccgggttttcttcgctcagatggcgctccaccagcgccatccaggccggcagatcggtttcttcggtggtatagaccttgtgcagcgcatcgccctgttggtcgaagaactgaatgctgtggcgcacgccgcgcttgttggtttcgctcatggcgaagacgctggtccagtggttgaggaacaggcgcagatccagctcgcgcgggttgaggatcagcccggcgtggccgtttaggtgctggttgcggtagcggcccatctgctcatgcaccgcatagctgttgcgggtgatggatttggtgacgcccacttgctcaagctcggtcagcagggtgcgcgcgtcggcctgcaggcggcgggcgtcgtgaccgacgcgggcgtgcgtcagctccgcttcgctgacgccaaggatcgccgccagatcgcgggcgtatttgccggggtgatcgattttagcctgttggtagcgttcgtatagggtgttgctcatgccggattctcctgcgctgtaatgcgaacggcggacaatcgggttgtccgccagatagtcaaatgattaccactggtagctgaccagcagtttggcgttgcggccatcctgcgggatgccctgcggcgagtaatattctttgtcgaaggcgttgcccaacaccacggtggtggtcatgccctgcagacggtcgcggcccttgtagctcagatagaagtcgttgacgccataaccggcttgttcggccgtgcctgtctccacgcgcgtcgcgcgttcggcgaaggtggcgacccagccggcagacagaccggtttcgcccagcggcacgtccagcgagctggtgacggtgtccggattgatgctgcttaaccagtcaccggtcgcttcatttttgccacgggtgcggttgtaagccaaatcccagccgaaccagggggttttatagctgagcgtagcgtcccatccccagattttggcgcgatcgacattggtcgagaaggtggtgcaactgatgcagtaagggccgcgcggaccgcgtcccagttccatcgtgacatcggtggtgatgtagtccttggctttggtatcgaaatagctggctttgaactgcaggctatcatcggccagcatcaaatcatcgaaacgcagaccaaacccgtactcttgggtctcgttggtttccggcttcaaattcgggttaggcacccaatagttggtgatggtggttggccccattggaattgagaagtgcttggagtcgttgtacatctcacccatcgttggcgcgcggaacgcctgagaataggagccgaacagcatcagccagtcggtaggcgtaatgctgactgcgccgcgtgaggaccatttgttcgcatccacatcggcatagccgtcgcttgagcccttgtaattgtcatagcgggtgccggcgagcagggtgacgggcagatcgcgcagcgtgatttcgtcctgcagccagcctgaagcgaaattgatttttgcgtgcgggaaactttcggtagcgccgcccggcgtttgctcctgtttgtaggcctcggtgccgtaggtcagcagatgtgaagcgaaagtatccgcaaacaggcgcgtgcggttttcgagtttgacgcctttcgtggtttgtttacgcgcttcatcctcgctgccattggcgtgagcgttaattttcacgtctgaataatacactttcgcttccgcatccagccaatcctggccgatcggcttcagtttgtaactcaatgccgcgtcgcgttgaatcgtcgaacgatcggtcattaagtttccactggagctggctggtgtttgcgggtttttcggctcctgggcgctgttgttgtagtagcgcaggttgccgcttagcgactggctattgtcgatcttccaggtgcctttagccagcacgttgctgatggtttcgtcgttaggcgcatcgaagccgttgccctgacgaagatcgccgacgtcgcgggtgccgaacgacagcaggccgtcgaggttatcggtcttgccgtaggcgctggcgcccatgcccaggctgtggtcgccggtgccggcggtgccgtagacgcggaacccgctatcctggcccggcagcagcagatcggcggcatcgacggtctcataagacactacgccacccaacgcgccgctgccgtacagcaacgcggaggggccgcgcacgatttcaatgcgtttcactaacgcaggatccaaaaaagtgccgttaatatggccggtatcggtcccctggcggatgccgtcaactaacgtcagcacgccacgtcggtcgtaaccgcgcatcatgagatcctgcccattgctgcgcccggaacccgtgacggtaatgcccggcacgcgccgcagcatatcggcggcggtgcctgcagtttgactttccggcgagttgccttcgatgaccgtgaccatcatcggcgcttcaaagctgctgcgttggttgccggtggcgaccacggtcatggtctcgtcggcgtttttggccgctgccgcgttggaagaagttgttgtgctggtgttttgtgccaaggccaccgtaggcagagcgcaggcaatcgccagactcaacgcggaaaaacgcagccgggtggaaaatgtcagaggcatggtgcaactctccgtatgtaataaaacatatcaatagatttgctggctgcctggatcaaacgatcggggtggctggcgtttgagggttctgtggttatttggtcaggatcaatttcccggctttggtctgccgcagctgatagcgctggccctgatgggtaatgaacgcgatgccgtcggcgccgagcagctgtgcgctgtcgtagctgggcggcgcgtttgcgctgtgctcggtcggggccgcggcggcaggggttggcgtgttggcagtatccatcatcattgtgcttataaaacaggttattaaatggtaattaatatcaaactgagaatcattatcatgtgaaggaaaggttacatcaaggaaaattttcttaccgatggaacctttttgtcgaacggacatccggcggcgggccgagcgcactcggcccgtaaaaaaggggcgttatttcagcagggtttcgatgcggtcaaacaggcgttcgggcttggtgatcggcgcaaagcgcgtcacgcgctggccgtcggcggtgagcaggaatttggtgaagttccatttgatgcggcggctgcccagaatgccgggcgccaggcgtttcagctcattgaacagcgggtgggcgccggggccgttaacgtcgatcttgctgaacagcgggaaactgacgccgtagttgaggctgcaaaaattggcgatctccagcggactgcccggctcctgagaaccaaactggttgcaggggaagccgagcaccatcaggccgcgctcgcgatagtatcgccacaaattttccagcccgcggtattgcggggtgaagccgcacttgctggcggtgttgaccaccaggtaagcgcgcgccgggaaatcgcccagcgttttttgctcgccctgcagcgtgacgcagggaatggataacagagagtgaatcatgccggggctcccagtgcatttcggcgggtgctaaagcgttgcaatcagtatagatgagcgggacagaagggagaaagccggggcgaggccccggtctatgttgcgtcagaaacggctatcgaccgcatccgccagcatcgccagcaactgttcgctgtcggaccagctcaggcaaggatcggtgatcgactgaccataggtcaacggttggccggcgacgatcttctgcgtgccttccaccaggaagctttccgccatcacgccggtgatggcggcagagccggcgcggatctgctggcagacgttgtcggccacttccaactggcggcgatgcattttctgacagttgccgtggctgaagtcgatcaccaggtgctccggcagatcgaactcgcgcaggctgtcacaggcggcggcgatatcgctggcgtggtagttcggcgtcttgccgccgcgcatgatgatgtggccgtacgggttgccgctggtctggtagatggtcatctggccatgtttgtccggcgacaggaacatgtgcccggcgcgcgccgcgcgaatggcgtcgatggcgatgcgggtattgccgtcggtgccgtttttgaagccgaccgggcaggagagcgccgaggccatttcacggtggatctggctttcggtggtgcgtgcgccgatggcgccccagctgatcagatcggcgatgtattggccgaccaccatgtccaggaattcggtggcggtcggcaggccgagctggttcacttccagcagcaggcggcgtgccatttcgatgccgcggttgacctggaaggtgccgtccagcgccggatcggagatcaggcctttccagccgacgacggtgcgcggtttttcgaaataggtgcgcattacgatctccaggcgatcctggtagcgctcgcgcagggcgttcagccggccggcgtaatcgacggcggcgtcgagatcgtgaatcgagcaggggccgatcaccaccagcaggcggcggtcttcaccggtgaggattttttcaatgcgtttacgtgacgctgtcacgttatcggcgatggccgccgagatcggcagcttgtccgccaacgcttgcggcgtgacgaggctgtcgatgcgcgcggtccgcagttcatctgttttgtgcatgttgttccctggaaactgttcttctctgcggcaggagtgccgggaagtgatggcgatcacaataacgcaaaaagcgctgaattcaaccgtagagattgcgttctgttgatcaaagccgcgaaaaaaagcacaaaaaaatcagctgctgctgaaataaacggcaggcggcggggcgcggcggccccgcgaggaaaagatcagaacatgcggcggctcatgccaaggatgtcgaggattttggtggagatctcttcgaccgaatagttggtggtattgaggtagcggatctggtttttgcggaacagcgcttcgacctcggcgatctccatgcggcactgacgcaatgaagcgtagcggctgttttcacgccgttcttcgcggatcgccgccaggcgctccggatcgatggtcaggccgaataatttatgctgaaacggtttcagcgaggccggcaggtgcaaattgtccatatcgtcggcgataaacgggtagttggcggcgcggatgccgaactgcatcgccagataaaggctggtgggggttttgccgcagcgcgacacgccgagcaggatcacctgcgcctgatcgaggttgcgcagcgaaatgccgtcgtcatgcgccagggtatagtcgatggcggcaatgcgcgcgtcgtacttgccgaggttgctggcggtcaggccgtgggtgcggttcggcaccggcgtcggctccacctccagctcaccctgcagcgggccgaccagcgcctgcacgatatcctgacagaagccttggctctgaacgatcacgtcgcgcacttccggcgagatgatggagtaaaacaccagcggccgtacaccggtttcattatagatatcatcgatttgttggcgaactgcgcgtgcgcgcgcctcggtttcgacaaacggcaaggtgtacgtggtcgccgtgaccgggaactgcgacagcaccgcgtgccccagcacttcggcggtgatcgccgtaccatccgaaatataaaaaacgcttctttccacccgaggctccttacctgaaaacggtgttcctgctgtcatcactgccaatatcatgagccgcagacgatccgccggtaaaggggcgagggaaaaaattgtgacggcggggcggtaaaccgccttgcggcggcgcgcgaagaaaagcgcgctttggcggcggcagaaatcgcggcgcagcgaccctgttcgagccgaaacgtaaatttgccgctattttcaccaaaaacgatagcgtttgcgtggtcattaaaacagaattttaaaaagagcgtaatttgttgagaactaagcttttcgtgcgattgggaacggttcccaggcaaatcagccggttaggacattctcttaaaaaccactttcttcagtgggttgatcgattcacctttccattttccccggatcagtgtgctagtctgattcggctccgtgttagcggtgccgtaaagcaagcgaattaaatccgtctttaccctactgatagcaataaggattgtctcgatgtccaacaatggcccagacttgcgtaatgtgctttggtacaaccagcttggcatgcacgacgttgaccgtgtcggcggcaaaaatgcctccctcggtgaaatgatcaccaatctttccgatttgggcgtggccgtgcctaacggttttgccaccaccgcacaggcgtttaacgattttctcgaacaaagcggtgttaaccagcgcatctatcagttactggatcagactgacgttgacgacgttgcccaactggccaaggccggcgcccagatccgccaatgggtgatcgacacgccgttccacgccgagttcgagcgtgaaattcatcaggcttaccaacagctcgccgacggcgaaccggaagcttcctttgcggtgcgctcctccgccacggcggaagacatgccggacgcctcctttgccggtcagcaggaaaccttcctcaacgtgcagggcatcgacgccgtaatggtggcgatcaagcacgtgttcgcgtcgctgttcaacgatcgcgccatctcttatcgcgtgcaccagggctacgatcaccgcggcgtggcgttgtcggccggcgtacagcgcatggtgcgctcggatctggcctcctcgggcgtgatgttcaccatcgacaccgagtccggctttgatcaggtggtattcatcacctccgctttcggcttgggtgaaatggtggtgcagggcgcggtgaacccggatgagttctacgtgcacaaaccgacgctgcaaaacggcaagccggcgatcgtgcgccgtaacctgggttcgaaaaagatccgcatggtatacgcgccgtcgcaggatcacggcaagcaggtgcgcatcgaagacgtgccggaagcgcagcgcagccgtttctcgctgacggatgaagaagtgcaggcgctggcgcagcaggcgatcctgatcgaaaaacattacggccgcccgatggatatcgagtgggcgaaagacggccataccggcaagctgctgatcgtgcaggcgcgcccggagaccgtacgctccaacgagcagaccatggaacgctaccagctgaacggcaccagcccggtgctggtggaaggccgcgccatcggccaccgcatcggcgccggtccggtgaaagtgatccacgacatcagcgaaatggatcgcatccagccgggcgacgtgctggtgaccgacatgaccgacccggactgggagccgatcatgaagaaggctgccgcgatcgtcaccaaccgcggcgggcgcacctgtcacgcggcgatcatcgcccgtgagctgggtattccggcagtggtaggctgtggccacgccaccgacgtgctgaaagacggccagaaagtcaccgtctcctgcgcggaaggcgacaccggcttcgtttacagcgacatgctggacttcagcgtgcagagctccgaagtgaccgagctgccggatctgccactgaagatcatgatgaacgtcggcaacccggatcgcgctttcgacttcgcgcgtttgccgaacgaaggcgtgggcctggctcggctggaatttatcatcaaccgcatgatcggcgtgcacccgcgcgcgctgctggagttcgaccagcagacgccggcgctgcaaaatgaaattcgcgcgctgatgcagggttacgatcacccggtcgagttctacgttggtcgcctgaccgaaggcatcgcgacgttgggcgccgccttctggccgaagcgcgtgatcgtgcgtctgtccgacttcaaatccaacgagtacgccaacctggtgggcggcgacaagtatgaaccgcacgaagagaacccgatgttgggcttccgcggcgccggccgttacgtggccgacagtttccgcgattgcttcgcgctggagtgcgaggcggtgaaacgcgtgcgtaacgatatggggctgaccaacgtcgaaatcatggtgccgttcgtgcgcaccgtggcgcaggcggaagcggtggtggccgagttggcgcgtcaggggctgaaacgcggcgaaaacgggttgaaagtgatcatgatgtgcgaaatcccgtccaatgcgctgttggcggatcagttcctcgagcacttcgacggcttctccatcggctccaacgacatgactcagctggcgctggggctggatcgcgattccggcgtagtgtcggaactgttcgacgagcgcaacgaggcggtgaaagcgttgctgtcgatggcgattcaggcggccaagcgccacggcaaatacgtcggcatttgcggccagggcccgtctgaccatgaagacttcgccgagtggctgatggagcagggcatcgacagcctgtcgcttaacccggacactgtggtgcagacctggatcaatttgtcgaaaaagaaataatgtctcggcctcactgaggcattaacgtcgggccgcagttaacgctgcggcctttttatttccgaatgtaaataacggcgcgtaaaataatcaattcgacgaaaaaagaataaaaaaaagcccaccgtaggagatgggcaaagactacacacagcaattcacatgtatggcattacattgttcagaaaggttgctttaaaatcagtgatttgaagcaatagatggccataatactagatttttgaacgcgactagtcattaagaatcatcctaatcgatagcggcatcacattttatttgcgggagttatctcttttttccgtttgcaacaaacagggatttacattgcacctttcattcgccgtaccgtaatcaatatagggcggcattatattgggcggagatattactcgaatgaggtaggaataatgacgggcgtgaaaagttccgcccgacggtgcgggcggaaggggggattagcgtttttccagctcgtcgatgacttgctccggcgcggaggtcggctccggcgcttcatccatccaggcggtcagcaggcgataagacaccgccaacaccaccgggccgatgaacaggccaatcatgccgaaggccagcaaaccgccgataacgccggacaggatcagcagcagcggcagatcggcgcccatgcggatcagcaccgggcgcagcacgttatccagcgtggccaccacgcagctccagaccagcagcacggtgccccaggtggtgtcgccgtgccagtacagccagatgatggccggcaccagcaccaacagcggccccaattgcgccacacagcagatgaagatcagcatcgtcagcagagtggcggcaggaatgccgcttaccgccagaccgatgccgcccagcaccgactgcaccagcgccgtcaccaccacgcccagcgcgacggcgcgaattgcctggccgcccagcagcaccgccgcatcgccgcgcgcagaaccgaggcgcaccgcaaagtggcggatacccagcgccacctgttcgccacgtgcatacaacaaggcgctgaacagcagcatcagtgcgcagtgcagcagcaggcggccgatatgcgccgcctgcgccacgaaccaggtggcggtttggccaaagtacggctgcaccttcgccagcagcgcggcgccgccggcgttaaccagcgtgtggtagctggtatagagtttgtcgccgatcatcggcacggactgcagccaggcgagatcgggaatatgcagtttgcccggcgaactggcccaggcgatcagcggcgcgctgttatccaccacgctgctgatcagcagtgagataggcagaatgaacagcaggatcagcagcagggtcatgaccaacaccgccagcgaacggcggccccacagcagcttttgcagtttgagcagcagcggccaggtggcgatcaccaccatgcccgcccaggcgaagccgagaataaacggttggatcacccaaaaacaggcgacgatcatgatggcgataaacagcacgccgaaaataattcgcggtaagtcgtaacgcgattgcgggagtggcatcagtgggttctcatcctggtcaattaaatccctggcaccggcgaatcggggtgcctgtcggtcggtttctcaccgccgggcggccgcctgtggcggcgttcgcagggcggtaataatgtgaatgccttcactaaacgagtatgttagtttttagtgtcactaaaaaatagggtgggtctgaattaaaggcccgattcagcgtacatcagcgcataaaaaatagacggacagggtcaaaaaagcgaatgatcccacagatttctcaggcgcccggcctggttcaacgggtgctcgactttttggaagcactgaagcaaaacggattcaacggcgataccgccaccagctatgccgaccggctgacgatggccaccgacaacagtatctatcagctgctgcccgatgcggtggtgttcccccgttccaccgccgacgtggcgctgatcgcccgtctggccggagaagagcgcttcaatacgctgaccttcagcccgcgcggcggcggcaccggcaccaacggccagtcgctcaataccggcatcgtggtcgatatgtcgcgccatatgaaccgcattctggagatcaacgtcgaacagggctgggtgaaagtcgaagccggggtgatcaaggaccagttgaatcaatacctgcgaccgttcggctacttcttctcgccggaactgtccaccagcaaccgcgccacgctggggggaatgatcaacaccgatgcctccggccagggctcgctggtgtacggcaaaacctccgatcacgtgttggggctgcgggcggtgctgctgggcggcgagatgatcgatacccgcgccatgccgacggcgctggcggaaacgattgctctggaagagaccgccgaagggcgcatctaccgcacggtgctcaaccgctgccgcgaacagcgcgcgctgatcctggagaaattccccaagctcaaccgcttcctcaccggttacgatctgcgccacgtgctgagcgacgatctgcaaaccttcgatttgacgcgtattctgaccggcgccgagggcacgctggcgtttatcaccgaggcgcggctggacatcacgccgctgccgaaagtgcgccgcctggtcaacgtgaagtacgattccttcgactcggcgctgcgcaatgcgccctttatggtcgaggccaaggcgctgtcggtggaaaccatcgattccaaggtgctgaacctggcgcgtgaagacatcgtttggcactcggtgaacgaactgatcgccgacgtgccggataaagagatgctcgggctgaacatcgtcgagttcgccggcgacgatcgggcgctgatcgacggccagatggaggccctgtgccaacggctggacgaattgatcgcgcagcggcagggcggcgtgatcgggtaccagatctgcggcgatctggcgggcatcgagcgcatttacaacatgcgcaagaaggcggtcgggctgctgggcaacgccaaagggcgcgccaagccgattccgttcgccgaggacacctgtgtgccgccgcaacatctggcggactatatcgtcgaatttcggcaactgctcgatgaccacaatctgagctatggcatgtttggccacgtcgacgccggggtgctgcacgtgcgcccggcgctcgacatgtgtgacccgcagcaggaagtgctgatgaagcagatctccgatcgggtggtggcgctgaccgccaaatacggcggcctgctgtggggggagcacggcaaggggttccgcgcggaatacagccctgaattcttcggggaaacgctgtatgaagagctgcgccgcatcaaggcggcgttcgatccggataaccgcctgaacccaggcaagatctgttcgccgctggcggtggatgcgccgatgatgcaggtggatgcggtcaaacgcggcaccttcgatcgccagatcccggtcgaggtgcgcacctcgttccgcggcgcgctggagtgtaacggcaacggcctgtgcttcaacttcgacgtgcgcagcccgatgtgcccgtcgatgaagatcagcggcaaccgcattcattcgccgaaagggcgggcgacgctggtgcgcgagtggctgcgtctgttggccgagcagggggtcgatccgctggcgctggagaaacagctgccgcagcagcgcctcagcttgcgcggcctgatcgagaaaacccgcaacagctggcacgccggcaagggtgagtatgacttctcgcacgaagtgaaagaggcgatgtccggctgcctggcctgtaaggcctgttcaacccagtgtcccatcaagattgacgtgccgggattccgttcgcgcttcctgcagctttaccacactcgctatctgcgcccggtaagcgactacatggtcgccggcgtggagagctataccccgttgatggcccgcgcgccgaaggtgttcaacttctttttccgccagccgtggctgcgggagatgagccgcaacgccatcggcatggtcgatctgccgctgttgtccagcccgacgctgcgccagcagctgtccggccaccgcgcgaccacgctgacgctggagcagttggaagggctgagcgccgagcagcgcgcagaacacgtgttgatcgtccaggatccgttcaccagctattacgacgccaaagtggtggcggactttgttcggctggtggagaagcttggctataaaccggtgctgctgccgttctcaccgaacggcaaggcgcagcatgtgaagggcttcctgacgcggttcgcccgcaccgcgcgcaaaaccgccgatttcctcaaccgtgtggcgcagctaggcatgccgctggtgggcgtcgatccggcgctggtgctgtgctaccgcgacgaataccgcgagatcctcggcgccgagcgcggcgatttccaggtgcagctggtgcatgaatggctgcagcagcggatcgcggatcgtgccgaacagccggcgaccggcgagccgtggtatctgttcggccactgcaccgaaaccaccgcgttgccggccagcggccaacagtgggcggcgatcttcgcccgcttcggcgccaaactggagagcgtcagcgtcggttgctgcggcatggcgggcacttacggccatgaagccaggaacctgcaaaactcgctcggcatttatgagctatcatggcatccgacgctacagcgtttgccgcggcagcgctgcctggcgaccggctattcctgccgcagccaggtgaaacgcatcgagggcaatggcgtgcgccacccattacaggcacttctggagatgattgagtgaaattgtggaaacgtgaaacatcgctggagcagctgaaccgcgccggcgacggctgcatggtcagccatgtgggcatcgagtttacccaactgggcgaggatttcctcgaggccaccatgccggtcgatagccgtacccggcagccgttcgggctgttgcacggcggggcgtcggtggtgctggcggaatcgatgggatcgatggccggctacctgtgcagtgagggcgagcagaaagtggtggggctggagatcaacgccaaccacctgcgcgcggtgttcgatggccaggtgcgcggggtgtgccgcgcactgcacgtcggccgtcgtcatcaggtgtggcaaatcgagatcttcgacgcgcgcgatcggttgtgctgcacctcgcgtctgaccacggcggtcatcgactgatccccgccgctttccgcaggcgctcggcctgcggagcctttcgctttacagctgaaacggcacgcgtttgacgaagtccttctgaaacgcgttcgccttctcccaggtgccttccattgcatatttttggcagatcagcgtcagcgtatggcgggcgaagtggtagctttgcacccgaaacagctggcaacgctgtgggttgttgatctcgacgatcagccggttgtgcagcttgctgagcgcgtgcaggtagctgtcgtcgtcgccgttctccagacacaaattggccatggtaaggctgacgctgttgtaccgcttcaggtggtcgatattgcattccgggcgccgtagcgccgcttcggccatgtaaaagtccaccgtggcgtcgcgcacgctgaatttgtagtcatcaatcttgcccagcaaccatgcgttgatcgaaagagtcattggcttcgcgctcaaattcaaattgaatgataatcattatcatataaactgccgcgttgccgatcaatccccggcgtggcgttttttcattgcgcggggtgtaaaaggccgccgacgacccaacttgatgctgagcgactaaactttaacctgagggcgcgcgcttgcgctgcgccacgaaatgccgataaacgcacatttacgacagacagaatgcagaaataggtattttctatgaatgtttagatcggcaacgtaccgcggcgctgtaacgctgacgggccaccggggagtgcggtacggtgatgcaggataaataacaaattcatagggatagcatgcacaccttgccgccagacgccgcaagccgccacggatgtcccgctggcttgccgcacgccgcagcgaaaaaccgcgcttgcggcggatacccccgcaaaacaaacggttgaagtgataatcgttatcactaacatataagcaacccagattggctgtggccaaacacgagtgtgaggtagaccctatgcaaacggaaaatgtcggcactttttctctggatgaaaatgtctggcaaggcatttcgctcagcgacagcgccgtacgacaaataaccaaactgatgcagcaggatccgcaggtgaaagggctgcagctaggggtgaaacaatccggctgcgccggctttgcctatgtgctggatctgacccgcgaacccgccgatgacgatctgctgtttgagcgcgacggcgccaaactgtatgtgccgctgaaggccatgccgttcatcgatggcaccacggtagattacgtccgcgaagggctgaatcagatattcaaattcaacaaccctaaagctcagcatgcctgcgggtgcggcgagagctttggcgtttgagcgatgcaatcaacatgacacgaagcaatgtagaaatgcctaatgaagtgcaggcttgggtcagcgaaggtcgctacaaagaaggtttcttcacccagctggctaccgatgagttggccaagggcatcaacgaagaggtggtgcgcgccatctcggccaagcgcaacgaacccgagtggatgctggaattccgcctcgaggcttatcgcgcctggctgcagatggaagagccgcactggctgaaggccaattacgaacgcctgaactatcaggactacagttactattcggcgccgtcctgcggcagctgcgacgatgcatgcggttcgcaacccggcgccgagcagcaaccgggcgcggcgacggaaaaagattacctgaccagcgaagtggagctggcgttcaaccagctcggtgtgccggtgcgcgagggcagcgaggtggcggtggacgccatcttcgactcggtctcggtcgctaccacctaccgtgaaaaactggcggagagcggggtgatcttctgttcgttcggcgaagcgatccaggaatatccggatctggtgcgtcaatacctggggcgcgtggtgccgtccaacgataacttcttcgctgcgctgaacgccgcggtggcctccgacggcaccttcgtctatgtgccgaaaggggtgcgctgcccgatggagctgtcgacctacttccgcatcaacgccgccaaaaccggccagttcgagcgcaccatcctgatcgccgacgaaggcagctacgtcagctatatcgaaggctgttccgccccggtgcgcgacagctaccagctgcacgcggcggtggtggaagtgatcctgcataaagacgctgaagtgaaatactcgacggtgcagaactggttctccggcggcgagagcaagggcggtatcctcaacttcgtcaccaagcgcgcgctgtgcgaaggcgccggttcgaaaatgtcctggacccagtcggaaaccggctcggccatcacctggaaatacccgagcgtgattttgcagggcgacaactcgatcggcgaattcttctcggtggcgctgaccagcggccatcagcaggcagataccggcaccaagatgatccacatcggcaaaaacaccaggtcgaccatcatcgccaaaggcatctccgccggccacagcgagaacacctatcgcggcctggtgaaaatcctgccgggggcggaaaacgcccgtaattttacccagtgcgactcgatgctgatcgggccggacagcggtgcccacacgttcccttacgttgaagcgcgcaacaacagcgctcagctggagcacgaagccactacctcgaagatcggcgatgaccagctgttctactgcctgcagcgcggcatcagcgaggatgacgccatttcgatgatcgtcaacggtttctgcaaggacgttttctccgagctgccgctggagttcgccgtcgaggcgcaaaaactcctggccatcagcctggaacacagcgtgggttaatcgccgcatttttagcgccgtcggcgctatctgaggacacagcatgttaagcatcaagaatttgaaagtcagcgtggaaggtaacgagatcctcaagggattggatctggagatcaaaccgggcgaagtgcacgccatcatggggccgaacggctcgggcaagagtacgctgtccgccacgctggccgggcgtgaagagtacgaagtgaccgaaggggaagtcaccttcaagggcaaggatctgctggagctggatccggaagatcgcgcgggcgagggcgtgttcctggccttccaatacccggtggagatccccggcgtcagcaaccacttcttcctgcagacgtcggtcaacgcggtgcgcaaataccgcgaccaggagccgctggatcgctttgacttcgccgatttcatcgaagagaaaatcgcgctgctggacatgccggccgatctgctgacccgttcggtcaacgtcggcttctccggcggcgagaaaaaacgcaacgacattctgcagatggcggcgctggagccggatctgtgcattctcgatgaaaccgattcgggcctggacatcgatgcgctcaaaatcgtcgccaacggcgtcaactcgctgcgggacggcaagcgcgcctttatcatcgtcacccactatcagcgcattctggactacatccagccggattacgtacacgtgctgtcccaggggcgcatcgtcaaatccggcgatttctcgctggtgaaacagttggaggagcagggctatggctggcttaccgaccaacagtaattcaaacgcgctgcagcaactgtatcgcctgttcgaaggccgcggcggcgagcgttcgccgcatgcgctggcgcactggcagcaggcgctgcgcctcggctggccgacgcgcaagcatgaaaactggaaatacacgccgctggagagcctgctggagcagcaattcctcgagccgcagcccgccccggtgagcgcagagcagctcgatgcgctggcgctcggcatcgatgcctgtcggctggtgtttatcgacggccgctacagcgccgcgctgagcgatggcgacctgggcgactaccagttcgagttgaccgcctatggcacgccgcaggcgctgccggagccgatccagccggagatttttctgcacctgaccgaaagcctggcgcaggaaaccagcctgatccgcctgccggccggcaagatccctgcacgcccgctgtatctgctgcacatcagcagcggacgcggcgccgccggggaagtgaacaccgtgcatcaccgccatcatctggagatcgggcgcggggctgaggcggaagtgatcgagcactacgtcagcctgggcgaggccgcacatttcaccggcgcgcgcctgaccgccaatgtggcggacaacgccgggctgttgcactgcaagctggcgtttgagagccagccaagctaccactttgcccacaacgatctggttatcggccgcgacgcgcgggtgaaaagcgacagcttcctgctgggcgccggcctgacgcggcacaacaccagcgcgcagttgaacggcgaaggcgcgaatctggtgatcaacagcctggtgctgccggtgggcaaagagatttgcgacacccgcacctatctggagcacaacaagggctattgcgaaagccgccagctgcataaaaccgtggtcagcgatcgcggcaaggcggtgttcaacggcatgatcaaagtggccaagcacgcgatcaaaaccgacggccagatgaccaaccataacctgctgttgggtaaggtggcggaagtggataccaagccgcagctggagatctacgccgatgacgtcaagtgcagccacggtgctaccgtggggcgcatcgatgaagagcagctgttctatctgcagtcgcgcggcatcgacaagcacgcggcgcagcagatgatcatcttcgccttcgccgccgagctgaccgaaggcatcgccaacgacaccatccgggaacgggtgctggcgcgcatcgcccagcgcctgccgggggaggctgcatgagttatccgattgaacgcgtacgcggcgatttcccgctgttggcgcgtgaggtgaacggccaaccgctggcctatctcgacagcgccgccagcgcgcagaaaccgcaggcggtgatcgaccgcgagctggagttctaccgccacgggtatgcggcggtgcatcgcggtatccacaccctgagcgccgaggcgactcagcagatggaagcggtgcgggaacaggcggcgcgctttatcaatgctgcctcggcggaagagatggtgttcgtcaagggcaccaccgaaggcatcaatctggtggccaacagctttggccgccacctgctgcagccgggcgatgcgattctcatcaccgagatggagcaccacgccaacatcgtgccgtggcagatgctggcgcaggagcgcgggttgcagctgcgggtgtggccgctgcagccggacggcacgctggatctggctcggttgccggaactggtcgacgcgtcctgtaaactgctggcgctgaccgaggtctccaacgtgctgggcaccgtcaacccggtgcgcgagatcatcgcccgtgccagaaccctgtcaccggatctgacggtgctggtggacggcgcgcaggcggtgatgcaccagcgcgtcgatgtccaggcgctggactgcgatttctacgtgttttccggccataagctgtatggcccttccggcatcggcatgctgtatggccgccaggcgttgttgcagcagatgccgccgtgggaagggggcggctcgatgatccggcaggtcagcctgacggcgggcaccaccttcgccgatccgccgtggcgcttcgaggccggttcgccgaacaccgccggcatcatggggctgggcgcggcgtttgattacgtcgaagccttgagcctgaatgcgatccacgattatgaacagtcgctgatgcattacgcgctcgaggcgctcaagcaggtgccgacgctgaaaatctatggtccggcgcatcgcgccggggtgatcgccttcaatctgggagagcaccacgcctatgacgtcggcagcttcctcgatcagtacggtatcgccattcgcaccggccatcactgcgcgatgccgctgatggcgttttatcaggtgccgagcatgtgccgtgcttcgctggcgttatataatacccgcgaagaggtggaccggctggtggccgggctgcaacgcattcatcagttattaggttaggctggggcgtgtccccggcggtacaaaaggatccccatggcgaatttgccggacaaagataaattggtgcgtaatttctcccgctgtctgaactgggaggagaaatacctgtacgtgattgaactcggcgctaaattgccgccgctggacgaggcggagcggcaggccgccaacctgatctccggctgtcagagccaggtgtggatcgtgatgcgccgcgatgagcaggggcaggtcgagtttcacggcgacagcgacgcggcgatcgtcaaagggttgctggcggtggtgttcattctttatcgccaattgacgccgcagcagatcgtcgatctcgatgtgcggccgtttttcaccgagctggcgctcagccaacatctgacgccttcgcgctcgcaggggctggaggcgatgatccgcgccattcgcagtaaagcggcgcagctggcctgatccataacgccttcatcctcaagactcattgatacctttgctttgtcaatgagtctttacaattcacaattttcctccgggcaacgcgcccaattcagtgatatttcagcagcttaactgttgacgtttcgttgacaatcaatgacggcgattacgttataacgtgttgatttttagaggacttattgcctttgataccagcgttgctagtattaatcaggtattgtctgatttacccaccacctggcgctcgttagccttgtgggcgaaccgtcataaaaaatatagggatgataatgaaacgtgcgttgagtttaatgggcatggtcttcgccaccgtattggccggcacgcaggccgccagtgcgaccgagtacccgctgccgccgccggacagccgtctgatcggcgaaaacaccacttataccgtgccaaacgacggccgcccgctggaagccatcgccgctgactacaagatcggcctgctgggcatgctggaagccaaccccggcacggatccgttcctgcccaagccgggtacggtgctgaccattccgacccaaatgctgctgcctgacaccaagcgtgaagggatcatcgtcaacctggccgagctgcgcctttattactacccgaaaggcgagaacaaagtgatcgtctatccgatcggcatcggccagaccgggatgcacacgccgctggaggtgacctccatcagccagaagatccctaacccgacctggacgcccaccgccaacatccgcaagcgctatcaatcccagggcgtgacgctgcctgcggtggtgccggccggccctgagaacccgatggggctgttcgccctgcgtctggcgatggggcgcggtgaatacctgatccacggcaccaacgccaacttcggtatcggcatgcgcgtcagctccggctgcattcgcctgcgtccgacggatatcgaggcgctgttcaacatggtgccgcgcggtacgcgggtgcaagtgatcaacgatccggtgaagatttccgttgagccggacggcaaacgctatgtggaagtgcaccaaccgctgtcgcgggtggaaagcgacgatccgcagaccatgccgatcgcgttgtctaaagcggagaaagcctttgcggccgatggtcagaccgatcgcgccgtattcgatagcgcggttgtacgccgttctggcatgccggtgctggtcaacgtaggggagagtccgtctgcggtgagtttgacacctgcagcggctcctgcggcgaataagagcccattcaaggcagcgccaatcagttcggtgaactaagtttgcaggattgagcggtcgaagaggggttcagcgtgctgaacctctttttttttgcctgccgtgcaggaacccccctggctggcgaacagacaaaaaaaaacggcgcacaatgtgcgccgttttcaataaccaaagctatcttactttttgtaagcgtgagcttggttgtccagacgctggttagcgcgtgctgcgtcgtctttagcagcttgaacgtcagaacgcattgcgttcacgtcgttgctcagctgatcaactttagcgttcagagtctgaacgtcagaagacagttgatcgattttagcgttgctagagcagccagccagcagagtggaacccaggattaccgcgcccagtaccagtttagtacgattcattataacaccctctagattgagttaatctccatgtagcgttacaagtattacacaaacttttttcgaaagagaataattttttagtgttgaggtgctttattttgatcgttcgctcaaacttgcatctggttttacaaattagttaaaaaaacgagggaaaacagccggcttccatgggactactccgattctttattagctaaataatgagcggatcgcggttgcgttttgagaaaaatagtttactgctgataaaaaaaacgccgcaaagcggcgttttgatcaagacaattatgtcacgttttatattacagcacgtgtaccgaggccgtgttggtggtgccgctcggcaccagcgcgccagagaccatcaccacgacgtcgcctttctgcgccaggccgctggccagggcggcttctttaccgatgcggtagaagtcgtcggtggaggcgatttccttgaccatctgcgggatgacgcccttgctcagcaccagctgatgcgcggtagtctcattggtggtcagcgccaggatcaccgcgttcgggaagtatttacgcacggattttgccgacttgccgccgctggtggcgaccacgatcagcggcgcgtccagtttctcggcggtttcaaccgcgccgcggcacaccgcttcggtgatgcgcagcttgcgacgatcgttcagggtgtcgatacggcttggcatcacgcgatcggtacgctcgcagatggtcgccatgatgttgaccgcttccagcgggtatttgccctttgcgctctcgccggacagcatgacggcatcggtgccgtccaggatggcgttggcaacgtcgccggcttccgcgcgggtagggcgcgggtttttgatcatggaatcgagcatctgggtggcggtgatgaccactttacgcgcacggttacatttctcgatcatcatcttctgggcgaagatcacttcttctaccgggatttcaacgcccagatcgccacgggcaaccatgatgccgtcggacgcttcgaggatttcgtcgaagttgttcaggccttcctggttttcaatcttggagatgatctggatctgctcgccgccgtgggctttcaggtgctcgcggatctccagcacgtcggagcgtttacggatgaaggacgctgccacgaagtcgacgccttgctcgcagccgaagatcaggtcgcgtttgtctttctcggccagcgcaggcagctggatggacacgcccggcaggttaacgcctttgttctcgcccaggtcgccgttgttcagcaccttacagatgacttcgttctcggtcacgttggtgacttccatgccgatcaggccgtcgtcaaccagcacggtgttgccgatcttcaggtcggcggcgaagccggcgtaggtgaccgccacgcgctcgctgttgccgatcacgctctggtcagtggtgaaggtgaaggtttggccggcgaccagcgaggcgtctttgccgccttccagtttcatggtgcgaatttccgggcctttggtatccagcaggatgccggcgttgataccggttttcgccatcacggcgcgcatgttcttgatgcggttgccgtgctcttcatagtcgccgtgagagaagttgagacgcatcacgttcatgcccgcattgagcaggttggtcagcatttcttccgattcggtttttggaccgatggtacaaacaattttggtctttttcatggcggagttttctacaagttgtgatggataaaaaaacgaatttgaccggcgcggtttacgccggtagggaatttgggccgtgcctggtggtgaaaaacatagttaaggataggtgacgacagttgaagtggggcggaaaaattcagcccgcgcgggggcgcggggatgctgcgcaacggggtaagatcacatcgtgttgttattgcgttttcgcagatcaagggctgaaaccattcaactgatagacgttgcgcattataaaggctaagcggcgggaaacaaaataaaaaaccgcggcggtgtggcggatagagcaaaacggggctaaatgtggcgcaaatgcaacgcgttgcgggccgcttgttgcgcaaataaccttgctgtaaatgcaggtttaacgcgtttggggaatttccagcagcgtgccagcgctcaggcagaagcagccgctggcgacgttggccggcagggtaaggctctcaccggcacgtactatccgggtgtcgccgccgagggtgaactcgaattcgccggatatcacccgggtttgcagcgcgtgcgcgggcttttgcagttggccgaaggcgccggcctcgaaacgcacttccgccgccggcgaaccgtcgctcatcacgccttcacggcgggcaaggccattgtcgagcggcaaaaaggcggttttggcggtgaaggtggtcatgtggcgttcctgatggctgatggcggtagttcggcgcaattgacatgaaaaatcgaacggtcgggcagagacgatacaacgggaagtataacgtgacagggagagatgaatcagcaatatggtgcgtccgagtggactcgaaccaccgacccccaccatgtcaaggtggtgctctaaccaactgagctacggacgcatcttttcctgtctgtcatggctgacagcggggacgaatattaacgagctacccgcgcgctggcaaggggaaaagcgcaattttattcggtatttcacgcgattgctgaggttgtgcgcagtccggcgtttttttccgcaaaccgcagcccggccggggaggaaaccggccgggctgcgggttcagcgtgtggatcgctgcaggatgacggtggtcggctgtttctgcagccagcgcatgcgcagcgccatcatgatggcggcgaaggtcagtccgatgataaagccgatccagaaaccgcttggccccatcgccggcaccagcgcatcggttaacgccagcagatagccgctcggcaggcccaaaacccaataagcgataaaggtgatgaagaagatcgcgcgggtatctttataaccgcgcagcacgccgctgccgatcacctggaccgaatccgagatctggtacagcgccgccagcagcatcaactgcgaggccatcgccaccaccgccgggctgtcgttgtacagcagggcgatcggttcgcggaaggtggcggtaaacagcgcggtgcagacggccatggtgatgccgacgccgatggcggagtaagcggcgacgcgcgcgccttcgaccgaaccttcccccagacgataaccgacgcggatggtggcgccgacgcccagcgacagtggcagcacgaacatcagcgcgctgaagttaagtgcgatctggtggccggcgaccgcgacgatccccagcggtgaaaccagcagcgccaccaccgcgaacagcgtgacttcgaagaacagcgccagcgccaccggcatgccgatgccgatcaggcgccttagcgccgcccagtcagggccgccgagatcgccggcctggcgtttgatgtcgcgctgcgacggcgcgcgcttcacgtaccagcgcatcatcaggaacatgatccagtagacgctgccggtggcgacgccgcagccgacgccgcccaactccggcatgccgaacttgccgtagataaagatgtagttgatcgggatattcaccagcaggccgaggaagccgatcaccatgccgggtttggttttggacagcccctcgcactggttgcgcatcacctggaagaacaggtaacccggcgccccccacatgatggcgtgcagatagccgacggctttatccgccaactgcggatcgatgttgtgcatcatgtcgatgacgaacttgcagttatacagcacgacgatcagcagcacagagacgccgaaggccagccagaagccctgacgcacctgatgggcgatgcgatcgcgacggccggcgccgttgagctgggcgataaccggggtcagcgccagcagcaggccgtggccgaacaaaatggccggcaaccagatcgaggtgccgaccgccaccgccgccatgtcggtggcgctgtaagcgccggccatgatggtatccaccacgcccatggcggtttgtgatatttgcgcgatgatgaccgggatagcgagagccaataaactacgcgcttcaattaagtacttctgcacgcatacaccttttctatttatatatgtgggagggagggctgccgcgagaggacaacaattaaaatagcggaattttgtcaaaaagattgtacctgctcggcgtcgttaagcaaacgccgcagataaatagttattaaatgcgcagccattctttttttgccgtcgcggatttggttttcagcgccaactggggcaaactgccggtagcgttttaacctatttagcaagaagaggcacatatgttcaccggtatcgtacaaggcaccgcgccgctggtcgccattgatgagaaacccaatttccgcacccacgtgatcgaaatgcctgccgagctgctgccggggctggagctgggcgcgtcggtggcccacaacggctgctgcctgaccgtcaccgcggtggaaggcaaccgcgtcagcttcgatttgatcaaagaaacgttgcgcctgaccaacctcggcgatctggcgctgggcgacatcgtcaatatcgagcgcgcggcgaagttcaatgacgaaattggcggccatttgatgtccggccatattatctgcacggcggaagtggccaagatttatacctcggaaaataaccgccaggtatggctgcgcatgccggatgcggaattgatgaaatatgtgctgcacaaaggtttcatcggcatcgacggcattagcctgaccatcggcgaagtggtgaataaccgtttctgcgtgcacctgatcccggaaacgctggatcgcaccacgctgggtaaaaaacgcctcggcgacaaggtgaacatcgagatcgatccgcaaacgcaggcggtggtggacaccgtcgagcgcgtgctggccaatcgggaagcgacgttggccgcggcgatggcgccggcgcacaaagactgacagcgattctggcgtgaccgccggcatcgaatcataagcagagaggagaaacgcgtgaagttttatgggaaaacgttgttgttaaccgcgttgctggcgctgagcgcttgcagcagttcgcctgagcagggcgcgggcgcgcaaatggccgatgcggacgatacctgcggcgcttcgcagtatcaaaattttgtcggcaaaccgatgacctcgctggaaggcgtgcggatcgacggcaaggtgcgagccattccgtacaactctgccgtcaccatggatttcaacctgcgccgtctgaacttccttggcgacagcgacgataaaattattcgcgtttattgcggttaacccgcagggttcgaaagagcaaaaaaaaagccccggcgaagatgttgccggggcttttttatcgggaaagcgttcagcgggcgacgcgaatgccgccttcaacgcctttcgggctgaacaccacctgccataactgcagatcgcgcgcccggaacgcgccggcgcaggcgttcaggtaatagctgaacatccgttcgaagcgttcggaatagcgctcggcgagctgcggccacgcctgtttgaagcgctcgaaccaggccatcagcgtgcgatcgtagtcggcgccgatgttgtgccagtcttccatcacgaaatggccttcgctggcctcggcgatatgcctcacggagggcaggcaaccgttcgggaagatatatttgttgatccagggatcgacgttcatgtcggtcttgttggagccgatggtgtgcagcaggaacaggccgtgcggcgccagattgcgctccaccacgtcgaaataggtgcggtagtttttcggcccgacgtgctcgaacatgccgaccgagacaatgcgatcgaactgctggtgcagatcgcggtaatcctgcaacaggatctgcacatccagcccggcgcagcgcgcctgagccagcttctgctgttcggcggaaatggtcacgccgaccaccgacacgccgtaatttttcgccgcataggcggaaaggccgccccagccgcagccgatgtccagcaaacgcatgcccggctgcagctgcagtttctcgcagatcatccgcagcttggcttcctgcgcttcctccagcgtggtggcgtctttccagtagccgcaggaatactgcatgtaaggatcgagcatcagggtaaacagatcgttgccgagatcgtaatgctctttgccgacgatccaggcgcgctttttcgattgcagattggtcaggcgcgcggcggcgatacgcagggtatctttcaggtggtgggggagtttcttctccagcccggcgctgaccacgcgctggaagaacatatccagccgctcgcactcccaccaaccgtccatatagctttcgcccaggcccagtgacccttgctgcaaaacgcgtttaaagaattcgggatttttaacctgaatatcgaaagggcgcgatccgttgatttcgataccggccagaccgagcatttcgtgcgcgatacggtaccactggttatcctggatgctcagatcttctatacacgatgaactcatagcttctccatcaccttcttccgactgatgacccgttaggaaacagcttagacaatttctgcgggtgcatacctataccaacgggaaataagcccgcggcgtctgatatccgactatgaacagaggaaatttaaagaaacggcccgacgcaaacggcgcaggataaacgcccctttaaaaaaagagtgtgacgcaaggcgcgtacacaatagctgattgagatatagagattataaggtgttactttacaaggttgtttttgagtataggcgtgccgaggcgttgactcaactgtaaatcgcactcggcacacatattctttaagtgattattaatcttggcaattatgacgctgagttagcatgttcccgctgtgccttttgctgcgcatcggccgcttttccccgctgcaggaaataacccagcgcggccaggactaccgtagataccatcaccgtcaccgtcgccaacagcggctgggcaataaacgccgacaccagcatgcttgccacaaaacacagccccagttgcagcgtattttgcagcgcggcggctttgccgctgctttccgggaacggcatcagcgcattcgccaccatgatcgggtagccggcgccgttgaccagcgccatcacgcagaatgggatcagcagcgtggtgagcgtcggattggtcagggtcgccaccagatacagcgccaccatgctgacaccataagctaccagcagccacggcagcagagttttgccattgatgcgcttaagcgcggcgcggcagccgtagccgcccagcaggaaggccagcgtttgcggcacatagctcagaccgatgtcgctcgggctatagcccatatcgccgaggatgaacggcgaaccggtcagccaggcgaagaaaccggccgagcaggcggcgtacatagcgacgttgccgctgaacaccggagatttcaacagttgccagaagctgacgccgtttttcggcgcgtcggcggcggggggcgttttggcgcgctctttgagcagcagcgtcggcagcagcagcagcgcggtgatcaccaacagcgcggcgaagatcgcacgccagctggcgtggttcagcagccaggcgccaagcagcggcgccagcgctggtgacagcgccaccagcggcatgatggtggcgaacacgcggttggcctggccttcgcgatagcggtcgaccaccagcgcttgccagatggcggtggcggaacagacgccgacggcctgaataaagcgcagtatccagagctgcacggcattttctacccacagcatgcccaggcagccgagcgcgaacagcgtcaggccaatcaataataccggtttgcggcccagtcggtcggagaggggcccccacagcagttgcgcgaaggcgaagccggccagaaagatgctcaggctggcgctgaccgcgccggcggaaatttgcagttcctcccgcatggcgccgaaggcgggcaggtacatatcggtcgccagataacccagcatgctcaggccggcgaggtagaacataaagccaaaagaatttcgcatggtatttctcgttaatattttagtgtcgcaggtttttagcgccggccagtgtatccggctggatctctgcttgtgaaacggtaatatttgcaaagtgctgttaaaaaaattgaaggcaaagcgatgtggtctgaatattctcttgaagttgttgacgcggtcgcgcgcaccggcagtttcagcgcggcggcgcaggagctgcaccgggtgccgtcggcggtgagctataccgtgcggcaactggaacaatggcttgcggtgccgctgtttgagcggcgtcaccgtgatgtggagttgacgccggccggcgcgctgtttatcaaggatgcgagagttgttatcaaaaaaatgctcgacacccgtcgccactgtcagcaggtggccaacgggtggcgcggccagctgaatatcgcagtcgacatcatcgtcaaaccccagcgcagccgccagctggtgctggatttctaccgccatttccccgatgttgaactgatgctgcaacccgaagtgttcaacggcgtttgggatgcgttggtggacggcagggtggacatggcgatcggcgccacgcgcgcggtgccggtcggcggcggctttgccttccgcgatatgggctacatgaactggctgtgcgtagtcagcccacagcatccgctggcgcagctggcagggccgttaaatgacgatcggttgaggccgtaccctgcgctttgtctggaagacacctcgcgcaatctgcccaagcgcgtcacctggacgctggataaccagcggcggctggtggtgccggactggacatcggcgctcgactgtctgtgcgccgggctgtgcgtcggcatgatgccggcgcatcgggcgctgccgctggtgcagcgcggtgagctgaaggcgttgcagctgcagcagccgtttcccgccagcccttgctgcctgacctggcagcaggataaaccgtcgccggcgatgagttggctgctggcgtatctgggcgatggcgagacgctgaatcaggagtggctgagcgaggcggcgccggaagccgtgcaggcttccggctcaggggattagcggcggtagtcgatgaacggaccgtcggcgaccgaacggcgttccaccagcttcggatgcacttcgatcacctgcgattcttcgcgcttgctgatgatgcgatccagcagcatggtgaaggccatttctcccaggcgctctttaggctggtgaatggtggtcagcgccggagtgaagtagcgggcgttgcgcacgttgtcatagccgatcacggaaatatcctgcggcactcgcagccccagctcatcagcggcgcagatggcgcccatcgccatgatgtcgccgccgcaaaataccgcggtcggccgctgtttttgcgacaggatttggtgcatcgccttgtagccggactccggctcgaagtcaccctggacgatccactcttcgcgaatgtcgatatgcgcttcctgcagcgccttcataaagccctgatgacggccgccgccggtgttgcgcgacagctggcccgggatggcgccgatatcgcggtgaccgcgctcgatcaggtaacggccggccagatagccgccttcgaacgcgttatcgatgatggtgtcggtgaagtcgccgcgcgcagcgccccagtccatcaccaccatcgggatattacggtagtcctccagcatgcccagcagttgatccgggtattcggaacacatgaccagcaggccgtcgacgcgcttttgcgccagcatcgccaggtaggcgcgctgcttgtccagattgttgtgcgagttgcacaggatcagggtgtaacctttgctgtagcagctgttttccaccgcctcgatcacttcggcaaaatagggtgcttcgctcgaggtggccagcaggccgatagacttggtgtgattgactttcaggctgcgcgccacggcgctcggcgagtagtgcagctctttgatcgcggcccacacggccgctttggtctcttcggcgacgaaacgagtcttattgatgacgtgcgaaacggtggtggtggaaacgcccgcgcgtttggccacatctttaatcgttgccatgtaaggaatgactcctgaactcacatgtttacagcatgtaagtgtgatgttaatcgtttgcctacgtagatccttctccagagaagcgaaaactgagtttttagtgtgttgaagtcttcagcgcttaatcaggaggggcatggatgccggtacgcagttgtgaactgcgaattttgtcgcatattgaacaaaagtggaagaggtaatcgagattataaaccgggaaatgataacaagattttatcggcgaactgtgggaaaatgatttgacgtactaattgtgcgccttttatccttaggaaagcccattttaaaggagttgtcatggataccgatctgaagatgtctctgttcactaccgtcggcgcgttggcgatgatcatcgctttcagctttgtcgccgcgttgaactgatctcccgccggttttaaaaaaggcgcagcctggctgcgcctcgtcacttcggcaaggcctgcgtttacgccaggttttccgccgcaaatttccagttgaccaacgcccagaagttttccaggtattttggacgcgcattgcggtaatcgatgtaatacgcgtgttcccacacgtcaacggtcagcagcggtttatcttcaccggtcagcggagttgccgcgttggaggtgttgacgatcgccagcgcaccgcccggttttttcaccagccaggtccagccggcgccgaagtttttcacggcggcatcggtgaactgctctttgaacgcagcgaaagagccgaaggatttgacgatcgccgccgccagttcgccctgcggttcaccgccgccctgtggcgacaggcagtgccagtagaaggtgtggttccacacctgcgcggcgttgttgaacacgccgccgttggaggtcttgatgatctcttcgagcgatttgccctcgaactcgctgcctttcaccaggttgttcaggttaaccacgtaggtattgtggtgtttgccgtagtggtattccagggtctcggcggagatgtgcggctcgagcgcgtttttctcatacggtaatgcaggtaattcaaacgacattgcttcctcctttacagcgccactttcttcccgcccaggcgggagccagatgggccgttttttattgtggtcattcaatcttaacaattttcatcataaaaaacaggaggaaaagcgagaaatgcgcgtgggggagtgcgatgggcgatagcttgagcaggcggttgcgaccggggccgcaaccgcgcagaacagggaattaacggatggttttcggcgtcactacgcggcgtgcgccgatgtaatggttttgccaatagtcgttgtcgagctggctgatgcggatctcttcgccggtgcgcggcgactggatgaatttgccgttgccgagatagacgccgacatggtccgccacgccgcggttgttgatgcggaagaacaccaaatcgccgctttccagttcgcttttcttgatcggcgccgcgtcgcgcaggtgatacatttcgttggcggtgcgcggcatcttgattttcaccacgtccttataggcgtaatagataaggccgctgcagtcgaagccggtgcgcggcgagctgccgccccagcggtaaggcttgcccatctgatccatcagcttggccatcgcggtctgtttggcatgctggtaacgttttttgtgcgccgggctgagttttaacggcttttcttcacgcgccagtttggcggtggccataccggcgtcgcggtggcggccatagccttttttatagccctttttcggcggggtgactttaatcttggcggttttctgcgctttggccttgggtttggcgctgacgatctttttcgcgcttttctcgcttttggccttggcggtcttggtttttttctcgggggccgtcactttggcttttttggcggctttatccgctttcttttttctgcggtcatcgggccgcgcttcattagcatggcttttacgctgctcggcggcaacgcgcgcctgtggcgcagcgtgcgccaaattgaagaagagctgcgtaaacagcagcgcaaagagcgtaagaattaaacgcatgtcgacgtcaccaaccttggccccgaaacggatatcgaaagagttacagtattcccgaacttcaccatataaaacagcgaagaactcataaataataatccatattgtgagaaaacgttaatgacattttttttggtttaaaatcagcctgttgatgtataaaaaagcgccaggcgacggtggcggatataattaagccgcgccggcatcgcggcgcaatatattagtgaaatggtcggattaaaaatgttattctcaacgtatgttttgaccggaatgacgtggccggtgaaacgcgatcggcggcgggcgaatatccttgcaaaagatggcgttttcttgcgactgttccagccgctacaatagcccgcgtgatgcatgttgtagccatgaaatgtggcttgaggaagcaataaatgacgacgacacttgaaaaaattcagcaccagatcgctgaaaacccgattctgctttacatgaaaggttcgccaaagctgccgagctgcggcttttccgcgcaggctgtgcaagcgctgtccgcctgcggcgagcgtttcgcctatgtggacattttgcagaacccggatatccgcgccgagctgccaaaatacgccaactggccgacgttcccgcagctgtgggtagatggtgagctggtcggcggttgcgatatcatcatcgaaatgtatcagcgcggcgaactgcagcaactgatcaaagaaacggcagaaaagtataaagcgcaggaagaccagcagtcttaatcgacgggcttgcgattatcgcgtaacgggcggcgccagtgtaactgggccgccttttttgttggttttattcggcgagatcgccggcgggcagcggccagccgccgagacgtttccagcggttaaccagctcgcaaaacagcagggcggtttgctcggtgtcgtacagcgcggagtgtgcctggctgctgtcgaacggcatgccggcggcgatgcaggctttggccagcaccgtttgccccagcaccaggccgctcagcgcggcggtgtcgaaggtggcgaacggatggaacgggttgcgcttcaggccggcgcgttcggccgcggccatcaaaaagctgtgatcgaagttggcgttgtgcgccacgataatggcgcgattgcaaccgcgatccttgagccctttgcgcaccgctttgaaaatggcgtgcagcgcgtcatattcgctgaccgcgccgcgcagcggattgtgcggatcgatgccgttaaacgccagcgcttccggctgcaggttggcgccctcgaaaggctccacgtggaagtgcagggtttcgtcccgctgcagccagccgtcctcatccattttcagcgtgacggcggcgatctccagcaacgcatcggtattggcgttgaagccggcggtttcaacatctattactacgggataaaacccacgaaaacgaccactcagggcgttaagatcacttttctcggccatcagtttcttatcttcatcgaatgcagcgcgcattatggcaaattttgcgcccggttgcaggcgctatcgcgcggagaatcagcagggcgccaacgcgccctgaaggggaggcttagtggccgaggccctgaccggcgtgtttgttttcgatcagctcgattttgtagccgtccggatcttcgacgaaggcgataaccgtggtaccgcctttcaccgggccggcttcgcgggtgactttgccgccggcgcgacggatgctgtcgcaggtggcggcaatgtcatccacgcccagcgccaggtggccgaaggcggtgcccatatcgtagctgtcggtgccccagttataggtcagttcgataactgcgccttcgctctcttccgtatagccgacgaaagccagggagtatttgtactccgggttttcgctggtgcgcagcaggcgcatgcctaataccttggtgtagaagtcgatggcgcgttgcaggtcaccgacgcggatcatggtatggagtaagcgcataattcctctgaattgactgtgccgtggcagacggcgggtggattgaagcacaagcgagtatagccttgtcccgcaagggaattcaacgtgacgaactggtgacaatgtcactttgtggtctcgcgtcgagggtgtctaaatattgatcgagtgtaccgatcgatacagagtaattgatctgcacaatcaattatctattccagcggcgatcgtgtaaaaatcgaacggcaataaagatcaacaccagggaacagcggcccgcctcgtgcgggcctttttgctttgcgcgcgacgcataaaaaacggccatgcgattgcgtggccgttggggtcaggacagattacttcgccagaaacggatagtcggtatagccttcggcgccgccgccgtagaaggtttccggcttaggttcgttcagcggggcgtgctggcggaaacgctctaccagatccgggttggcgatgtagctgcggccgaaggccaccgcgtcgatgaaacctttttcgatcaatgcttcggctttttcggcggtgtaggcgccggcaccgacgatcacccctttaaagtgggcgcgcaccgagtcgcggaaggcgtcggaatacggtttgccgccggcccagtcaggttcggagatgtgcaggtaagcgatattgcgcttattcagctcttccaccagatacagcactgcttcttcctgatcttcgccgttgtccagcccgttgaacggccccagcggcgagatacggataccgatgtgttcggcaccccattcggcgatggtggcgtcgaccacttccagcgtcaggcgggtgcgattctcaatgctgccaccgtattgatcggtacgttggttggaagccggtgacatgaactggtgcagcagatagccgtgggcagcatgcagttcgatgaagtcgaaaccggcttcgcgcgcgttggcggttgcttggcggaaatcgttgatgatgcccgggatctcgctggtttccagcgcgcgcggcgtggaggtcggcacgcgcacccaggcgccggtttcatcacgcacggtggtgcgggtttcggcgttgatggccgaaggtgcgaccggcgcttgcccgcctggctgcaggctggcgtgggaaatgcggcctacgtgccacagctgcacggcgatgtggccgttgttgtcatgcactgcctgcgtgatgtttttccatgcggcgatctgctccggcgtatgcaaaccgggcgcgccggcgtagcctttcgcctggaaggaaacctgggtcgcttcggtcacgatcaggccggcgctggcgcgctgtgcgtaatattccgccatcagcggcgtaggaatatcgcccggctcgatgctgcgcaaacgcgtcagcggagccataaacacgcggttgggcagggtgatggcgccaaccttcagcggagagagcaatttttcagtcttcatagtgcatcctgtatttaatagaccggtcgtctagtaatgggcgataaaaaaccatgaactgcattttttcaataaaaataagttgttaccgttacggttgcggcgggcgcagcagcaactcgatgctttccagcgcgctggtcaacggcgccagcgagtgacggattttggcgcgcagcggggcgccgagccacagtgaatacagcgtttctgcggttgccgccgggctcatggctaccgacagcgagccctcggcgataccgcgctcgatggcctcctgaaggtggccgatcacgcgagcggtgcccgtttccagcgcatggcgcatcggttctgacagatcgctcacctcggcggaaagcttcaccgccaggcaggcgttgtggcattcgctgcggcagtggtagctgatagcctgggcgtaatagccgagcagctggtggcgggcatcaccgcgtctgtcggcaaacagcgcctgcatttctgcatcataatgcgcgaaatagcgctgcagcatcgcttcgccgaaggcttccttcgagcgaaaatagtggtagaacgagcctttcggcacgcccgcggtggccagcagttcgctcagccccatgccggtaaagcccaggcgcaggctgagggtttcgccggtggcgagcagatgttcacgtgtatccacgttgcaatgcgttgatttggtcatcatggtgccgagcataatagaccgattggtctaggtcaatgggaataaaaaaaccggcgcacaaaacgccggttgtctgcaaactattgtgccccagcggcacgcggaagttaagcgctacgccgcgttgcggcagcgttgcaggatatccaactgggattgatattcgcgggtttgtacgttcagcatgcccaacagggtgtggaacaggttgtcctgcgaaacctcgtccttttccgccagcgtattcagacactggcgatcgatgccgaaattgcgctgatagtcggccgacatccacatcaggaaaggcacgtgcgtttgctggctcggtgcgaagacataaggcgtgccgtgcagatacatgccgttttcccccagcgattcgccatgatcggacaaatagaccagcgcggtattgaaacggtcgtcatactgccgcagcagcttgatggtggcatcgagcatcgcgtcggtatacaggattgagttgtcgtaggtgtttaccaattgttcatggctgcaatcctggatctgattgctgttgcaggtcggcgaaaacgtctggaattctggcgtgctgcggcggtagtaagccgggccgtggctgcccatctggtgcagcacgatcacgccgtcgtctttcaggctattgatgtagtcgttcagcttgtacaacagcacgttgtccatgcaaacctcgccgtcgcagtcctgctgcggtttcagcttggtcatgtcgatgtgcggcacccggtcgcaggcgcctttgcagccgccgtcgttatcgcgccacagcacattgacaccggcatgtgccagcacgtcgagcatgccttcctggtgcgtcgcctgagtcgcgtcgtactccttgcgtggcatgttggagaacatgcagggcacggagatcgccgtttcggtgccgcaggagctggcgtttttgaagtagaccacgtcgtcctgcttcaggcgcgggttggtttcgcgttcatagccgcctagggagaagttttcggcgcgggcggtttctcccacgaccaggatcaccagcgttttcttggcctgcctggcgatcagcggccctttacgcgcatcttcgccgatcttgaccagcggcagattgcgggtgaagtaacgctgttcggtaaacttgatggtgccggccacgaagttggaaggcgtcaacatcttcaccacgcttttattgttgcggatcagcgaagcgtagtctttgtagaacagcgcggcgacgatcaggatcaccaccaacgagagcatgacgttggcggcgcgcagtccgaccatgtaccaccaggggcgagtctggcgaatttgggtgaagcagaccgccaccgccggcagaatgccgagcagcgtcagccacaatcccatgcgcggcgtcagcagcgcggtcgcctcctgagggttggtttcgaaggcgttttgcatcatgttgccgtcgatcaccacaccatagctgtacatgaaatagttggctgcggcgctgccgagcaagaaaaagatgatcagcggcttgcgcaggtagggcacggtcaacacgctgaagatgatattcaacgcacagaagatcaccaccggcatgctggcggcgaaaatcacgctgtgggcgctatcgaaggtgatatacgaccaggcgcgctgcaggaataaggcgttctgaaataaagtgaagaacagggcggcggcgagggtaaaaccgaggctgttgcaccgtaagcgttgacgtaaccacattgccaaatcgggatcctgaaagtagataatgccttgaaatctaccggatgaaacttaagaaaaccttagaaactcagattactggcggcggagaatacgcggaaaacgccaggccgagcggcctggcggcggggcggtttagtaggcggcggtgaattgcgcacgaataaactgaggcttttcaatctcatcaacgatagcgaccgccaggtcttccaccgaaatgctggccggcgcttcgccgttcatcagcagttgcgtggtgccgaggcggaactggccggtgcgtttgcccggctccagcagggcggccggcgaaagataggtccagtcgagtgccgactcgttacgcagtttgttgcgcagatcgcgcaccgcctgcgcgccggggcggatattttccgggaactgcggcgtatccaccagttcaacgcccggcgccacttccaggctgccggctccgccgaccaccaacaggcgtttgacgccggcctgctcgaccgcggtgaggatctgctgggcgccgcgggtggttttctcatacaggttgtcttcgccccagccggggttgtaggcgctgatcaccgcatcctgaccgcgcaattgtcccgccagccaagccgtatcggcgatgtcgcccagtgcgacggtcagattggcgtgctccggcaactcttttttctggcgcgcgattgccgtcacctgaataccgcgagccagcgcttcatccaccacgcggcggccaacaaaaccggttgctccaataatggctactttcatctgtatgctccttcggggataggttcagtatcgtgaggcagaccgaggtgcctgccgcgtggtttctactctagtccttaacaatagccgtgattagtgccatattcatgctttcttgattaagtaaaacttcataatcgtggataaactcaatcgaatggcggtattcgccaccgtggtggcggagggctcgctggccggtgcggcacggcgactgggcatgacgccgtcggcggtcagccagcacatgcgctcgctggagaaggcgcttggggtgccgttgctgcatcgttccacccgccgtctggcgctgaccgaggcaggagcggcgttctatcccggctgcgaggcgatgctgcaacaggcgctgcaggcggagcagcggttggcggagctgcgggatacgctggtgggggagctgcgcatcgccaccccggtcggcatcggcggccgatcgcttgcggaggcgttgtcgccgctgttgcaggcgcatcctaagctgacgctgcgagtgctggcggacgatcgcatcgtcgatatgatagaacagcgggtcgacattgcgctgcgggccaaccggcagctggcggacgccaatatgattgcgcatccgttgacggcgtggccgatggtgctgtgcgccgcaccgcgttacctcagccagcatggggtgccggaaaaaccgcaggatttggtacagcaccgctggatctccagcggctacagcggggcgcatctggatttgcagcaccagtccggccagcaggtcaagctgcggctggcggaaggacagatcgtcagcgagagcatgaacgtgatgcgcgcctttacccgcgccggtctgggcatttccgttcagccgctgtatgaaattggcgacgaactgcagcgcggcgagctgttgctgctgttgccggagtggcggccggcgccgctgcggctgcacgcgctgacgctggaacgcactatgccggagaaaagccgccaggcgctgcgctatttgcgtgactattttcgccgcaaaggagaaaagggacttgccagcggcggcgatggcgtcttcaattagcaagagaacgcaggaggagccccgtggcgcagcagcttgagtttttcgacatccccagcccgtgtcgcggcatttgtcaggccgacgatcgtgggttctgccgtggctgcctgcgcagccgcgaggagcgtttcggctggatgaacatgagcgatgcgcaaaagcgcgaggtgttgcgcctgtgccgtcaacgcttcctgcggctgcagcgcgccaataaagcgcctgacgagccgctgccggagcagccgtcgttgttttgacctttcctgatctgccgcacgttcgtgtggcttaccgcttccctgtgcctcaccggcttgtgtatgctggctgacaactaatgtcatgaggttttcgcaatggtagaacgtattcgtctcgcgccgcaggggcctgaattttcccgcatgatttgcggttactggcggttgatggagtggggcatgtcaccgcagcagctgctgacgttcatcgaacagcatgtcgaactgggcgtcaccaccgccgatcacgccgatatctacggtggctatgcctgcgaacaggcgttcggcgacgcgctgcgtctgaagccggcgctacgccagtcgctggaattggtgaccaagtgcggtatcgccaccaccgccaagcccggtaacccgattgggcattacatcaccgaccgcgatcatatcgtgcagagtgcggaacagtcactgcgccatctgcataccgattacctcgatctgctgctgatccaccgcccggatccgttgatggacgctgacgacgtagccgaagccttcgttgcgttgcacaaaagcggcaaggtgcgccatttcggcgtatccaactttacgcccgcgcagttccaactgttgcagtcgcgtctgccgttcacgctggcgaccaaccaggtggagatctcgccgattcaccaaccggccattctcgacggcacgctcgaccagtgccagcaactgcgcatcaagccgatggcctggtcctgcctgggcggcgggcgcctgttcaacgacgccgagtttcagccgctgcgcgacgagttgcagcgggtggcgcaagagatcggcgcggagaccatcgagcaggtggtgtacgcctgggtgatgcgcctgccgtcgtcgccgttgccaatcatcggctccggcaagattgagcgggtgcgttcggcgctgaaggcgcagaaactggtgctgagccgccagcagtggttccgcattcgcaaggcggcgctggggtatgacgtgccttaaggcgggcagaaagaggaaagccgggcggcgaaagcgcccggctttttttatgccgatctttaggccaacaccacctgatcggtgctgatgtgatcgagcgagacgccgatcagcgtgacctggctgtggccgaaggccagcaccagatcgtcgttttgctgcgtggcgtagtcgcggatattgccgctggcgccttcggtgccgataaataccagtttatcgctggcgttgaagccatacagctggtcgcggccgaaatcgccgctgaacaggaaggtgttgccgttgccgacgcccttcaggatgtcatcgccgctgccgccgacgaaggtcaggttgccgccggcgtggccgatcagcgtgtcgttgccggcgttgccgaacagccaggcgtcgtggctgcgagcctgcagcacgtcatcgccgtcgccgccggtggcggcggcggcataggctttgaggcctgagtccgatttcaatccggcggcggttacctgatgatccacttctttgttgaagataagccaggaggtttctttgctgcgcagggtgctgatgtcgtccgccagcgtaatgccgcccttggcgtcgcgcaggtaaagcgtgttgccgtcgtaggcgacctcggtattcttcaacgcctgctgggtatcgaagatattgtggcctttgccgccggcgatcaggttatagccgccggcgtcgcggaagatatcgtcgccgtcgcggccctcgagataatcgttgcctttgccgcccttgatcaaatcattgccgtcgctgccgatgataaacgtcggcccgctgtgcgtttccgcgttgcggttcaggtcttccacccaggtactgccgcgcgtcacgttcgacaggttggagacgatgatggtcgagtctttgtcggtcagcgaataaaactcggagttcagcacccgcatcaggccatcctgatagaagaacggcaggtgggatagccaggtcggaatgttgagaatggagaacggcaacagattccaggcgtccgacgcgtagtggtcgttgaagttgacgatattgttggtggcggaggtatgcggcgcatcgtgaacgcccaatgacggcagggtcagcgaggtgccgtcgagcgcgcgaaacaccggatcgttctcataaccgatgttgatcaccttgccgccggcttcgtactgggtcggcgaggcgaaggcgacatagttggactgcgcgtagaagccgccccagttggcgtcgctctgcgccgccatgctgttgaccgccagcccgccgaggctgtggccgctgaccaccacgtcctcgccgctcagcccgtgggcctgcgcgaatttcgccacgtcgcccagcaagttgccgaacgccttcagcgtatagccgtcggcgtaacctttcggcccgaacccggccagcagatcgttaatcacatcgccgatggtatcgccgatcaacgactcgcgcgggccgctggtgccgcgaaatgagatgccaatggcggtgagattgccttcgctgtcatatttgcccagcacctcggcctgcgcggtggtgtaaccggcggtctcgccgtagtaggtgccgcgtgcatcggttttgccggcgtaacccaactgcgtggcatcgatcaccgaccagccggcattatttaccgcttcctgcgcggcctgttcggagtcggggttccagggcaggccgggcaggccgccctgcgactgggtgctgccgatgagcgccgtgatcagcgtcagcggcagaccgggcccgaaaccggtctggtgatagccttcatcgaagccgttatcgatattgtggtaagcgtaggtagagatggccaaggcgtcggaaaacagcgcctttgacgcgttttcgtccagatccttatagctaaagatgcccatatcagttccttatgaagtatgccgcctggccgggaagtgaactctcgcgcgtcggcggtggaaacagggaaacaacgttagccgaacgacagctggtcagaggaccaacatcggtagaattattattggtgctaaatattaggcccgcgaatcaaattggcgagattgtgcgttggttaacagtgctggcgttggctctcctatactgataactcgatatagtcattaaggagactgattgatgaaacgttattggtatgcggcgcttggcctgatggcctgcggggccgctcaggcggcgacggtcgacgttgagatgaatttggtgaccgggcagggtatcggtcaggatatcggcaaagtggccatcagcgaaacgccttacggcttactgttcacgccgagcctgaaagccttgccggccggggtgcacggtttccatgtgcatgagaaaggcagctgcgagccgggcatgaaggacggcaaggcggtggcggcgctggcggctggcgggcattttgatccgcaaaaaaccgggaaacacctcggaccctatgccgacgggcatctgggcgatttgccggccatctatgtgaccgccgacggcatggcgaacgatccggtgttggcgccgcggctgaaaaaaatcagcgaaattgagggcaaggcgctgatggtgcacgccggcggcgataaccactcggatcatccacagccgctcggcggcggcggtgcgcgcttcgcctgcggcgtgatcaagtgatcacccgccgctaacggccggtgtggcggcgggctggcccatcgcctgttgcaactgctgcagcgagcagtagagccgccaaatcaggccagccagatcgcgcgccgcctgttccgggtggtgcgccagcgcgttgctcatgcgcagcaattcctgcagcgtggcgtccagcgaactgtgctgcacgcctttctccgtcatgatgccgcgcaggcagtggatacagacgttgcgcaccgccgacagcggatctgatcgggtttgccagtcgcgcagttgccagacgatatggctgcagttgagcagcaccacgccccagcgcagtaaccaggtgcgcgcctcctgatcctgactttgattgagctggctgatgcgatggtagatcagcgattcaaactggctttcgctctgctgcggccgtttgctcaactgatcgataaagtcgcgccgcagcgcgcggataatgcggcggcttttgcgtttgtccgagctggggcgcaggatctgaaacgccagcccggccagcagcacgccgacgactttagcgatgttgtcattgataaaggactggtagtcatagctcggcggattgctgacggtcagaaacgagcccataaagacgatcagctgcccccaaagcgcggcataaggcgggttctgcagcttgagcatctgcatggtcaccaggatcgggaacaggaaggcgcagaacacccagaaatcgtcaatctggatcatcaaaccgaatttcaccacgaagcaggcgaccgagagcagcagcaccgccttgagcaaggtgctgacgctgttgatcggcgaaggcgtggaggagtagagcacgcagctgatggcggtgagcgtcagcgccgcgctgccggcgtcccattgcgtgttgatccagtaggcgcagccgatcacgatgcacaaaaaggtgcgcaggccattgtaggcggcttcatagctgtcggtatggcgcgccagcgaagtggcgcgcggcggttggagatcgctgaccgccgtggcgctttccaaccgccgcagccagcggctgcagcgcaggtaaagccaacagaaatcgcgcaaccgcagccagaaggcgcgatggcgatagtccgcgggatcgtgcggcgcgatctgctggagcaggcgcgccaagcgatatttatcggtggcgggatcgcgcagctcgtccagcagttgcgtcagcaccggcatcagattgacggggcgatccggccagttcagcagcatgcggcgcaggctggagatgacgctggtaatgcgcagctgctggtgcagcagatagttgagcaggttattttgccgccgcagccggtagtggctccagaatgcctgaatgcgcagcaggttcatggtcaggatctggccgatgaccccttcgtgcgaggtgcgcatctgcgcggtgacctccggctgccacagcatggcggcgtgctccagcaggcgcagttgcatgcgccgcagcgaggtcatcagggcttcgccgtcggaggtgctgggcaggatcatcatcatcaacccgccgcacagaatgccggtgatcacttcgcaaactcgcgcctgggcgatgtcgaagatctgctgggtatcggtgacgttgaccgtgccgaaggcgatgatggcggcggtatagcccgccagcgcgaaggcataagagacgttgttttggtaatggttggagacgtaggtgcacaacccgatccagacggcgatgaacagcgtaaacagccagggatcgttcaggcagtggccggcgatcgccaccgaggcggcggcgcccaccaggctgccgaagatgcggccgatgcttttgctgatcacgccgccgatggtggggaagctcaccaccgcggcggaggtaagcgcccaatagggttcgtcgagttcgagcacgaacgcgacccacagcgccagacacatcgccagcgagttgcgcagcgcatagcgccattggccgccggtcgccttaccccagggggtacggctccactccagaaagggcaggttcacactttagttccgctgatgaatcgaaatggtgcaggtggtgccggcaaccagcgtcaaatcggcgggcacgttgagcaattttatccgcaccggcacgcgctgagccaaacgcacccagggaacattgggcttaacatccattaatagatcgttgttgctgtcaacgctctgatcgtaaatggcgcggccgatactctctacttctccctgcagcggggtgttgccgttatataagacaatatcggctttattgccttcttttatatgtttcagcttggtttcttcgaaataaccgagtacataaaacgaatggacatccaccaacgcgaccaaaggcgtgccggcgttggcgtagttcccgacccgcgcctgcagattggtgatataaccgtcggtcggcgcgtaaattttagttttgctcaaattccatttggcctgttccaggttggccagggcggctttataggcggccttcattgcctgagcggctaaattggactcgtccaaatcttcagcggaaataacgttgcgcggcaacccgcggcgtcgggcggcttcgtggtctgccttggccagatccgattgcgcttttgccaccgcggcctcggcattgtccagcgcgatctggtagggcaccgggtcgagggtaaaaatcagacttcccgcaggtacgaactgattgtcattcgcgcttattttctctaatcttccagagacttcaggggtgatattgacgagttcggcgcgcacttttccatcacgggtccatggggattgcatataataattccagagccaccaaccggcgcagacggcaatggcgcagacgatcaccgtagagaagtattttaatgttttatgctgcatgggttaccaactcgctaaaatccataaggaaccgctgacggtcagaacgaaaatggacaggtccatcaacatgggatgccagatttcaccggaatacatccagtctctcagcagttgatgaatcagcagccataagaccagtcctagtaaaaaagctttaaatataggtggaaaataaagcgatgcccccaggaccaaatcgggtaagggggatgaggtgtgtaaccatgatgtattcacattaacaatccctaagggtgaatatgttgaatatttgcataacgattaaacgataacggccgaaaatagtggctatttccacaatatacattatatacatttgtgtttttaatgtgagttacccaaaatagtctaaactctgggaggtaatgttagcatgctaattataaggagggggaagtggagtcaacattaggttcagatttagcacgattagttcgtgtttggcgcgcgctcatcgatcatcggctcaagccgttggagctgacccaaacgcactgggtcactttgcacaatatcaatcgtttgccgccggagcagtcgcaaatccagttggccaaggcgatcggtatcgagcaaccgtcactggttcgcacgctggaccaattggaggagaaggggctgatcacgcgtcacacctgtgccaacgatcgccgcgcgaagcgcatcaagctgaccgaagcggccgatccgatcatcagggaagtggacagtgtgatcacgtctacacgcagtgagattttaagcggcattaccgccgacgaagtgcatctgttggtagggctgattggcaagttagaacaaaatatcaccgaactgcagaacaaataataatattcttatttttctacgattacagtttcacagcatcagaaataaaaccggaggcgattgcctccggtttgccgtgtgccgccagctgacttacagcggagagacggtgatggtgtcgcccatgcgcgccatgcgcacgcgctgacccgggctgaacttggtgtcgcctgctttctgcaccaccacgatgttctctttctggtcggttttgatttccagctcgtagcctgaggtacgaccggccacttcaccgatgctgttgcccgccgcgccgccggcgatagcgcccgccgcggtagccaacgtacggccggtgccgccgccaacggtgttgcccaacaacccaccaattaccgcgccgccgatcatccccaaggcgttggagccttcgccgccctgaattttaaccggacgcacggaaaccagcgtcccgtaagtgacgttctgcacctgcttggcctgcgaggacgagtagacatcgccggacatggattcattggcacacccagccaacgtaacggcggcgacggcaacgacgagaagacgcttgatcatataaaactcctgatggtagtagtccataacctggcaatgctcaccaggcaagattcagtgaaaatgatagacaaagtatggctgaaagttgatacagcgccatgcctcatcgctgcacgcagcttaacttttctctgttcaaccaataataaaccgcggtttacctttatgacagcctcaccgacattccgttgccggttaacgcacggtttaacacataaaatgtgccacagagacgcatctggctcacggcgcgtaaaaaaagcatcataattcatggcgttaattcgtcaattctggtttatttgtcaggataaaatttgcttaccgtgcgggttagaggatgttgctatgaagtcaggccgctatataggcgtcatgtccggcaccagtctggacggaatcgatgtggtattggccgcgattgacgatcgcatggtggcgcagcaggccagctatagccatccgatgccgatggcgttgaaaaaagagatcctggggatgtgccaggggcagcaaactacgttggccgccgtcggccggctggatgcgcagttgggtacgctgttcggcgaggcggtgctcggcctgctgaagcaaaccggcatcgacgcggagcaggtcaccgccatcggttgccacggccagacggtgtggcacgagccggaaggcgacgcgcgtttctcgatgcagctcggcgataacaaccgcatcgccgcgctgaccaatatcaccaccgtcggcgatttccgccggcgcgacatggcgtacggcgggcagggcgccccgctggtgccggcgtttcatcaggcgctgctggggcatcccgtcgagcggcgcatggtgctaaacgtcggcggcatcgccaacctctctctgctgttgcccggtacggcggtgcgcggtttcgataccgggccgggcaacatgctgatggacgcctgggtgtggcgccaccgcgcgcagccttacgatcaggacggcggctgggcgatgcaggggcgagtctgcttgccgttgttgcagcagatgctggcggatccgtacttcgcgcaaccggcgccgaaaagcaccggccgcgagtatttcaatatcgcttggctggagcggcagctggccggactaccggcgattgcgccggtcgacgtgcaggccacgctgacggagctgaccgccgtcagcattagcgaacaggtgcagctggccggcgggtgcgagcgtctgttggtgtgcggcggcggggcacgcaacacgctgctgatggcgcgtttgtcggcgctgctgccgggcactgaggtcgggctgaccgacgatttcggcgtcagcggtgacgacatggaggcgttggcctttgcctggctggccttccgtacgctgtccggccaggccggcaacctgccttcggtaaccggcgccagccgtgaaacggtgctgggtgggatttatccggttttgccattggggggccgttagctctgttaggatagcctgtgaaggatttttctaaggagcaacagcatgaaaaaagtcattttcgtcgccggcgcgctggcgctgtccggctgcagctacatcctgccgcagagcagccagacgatgcactaccagtgcggcactacgccgctgacggtggcgctcgacggcaaggcgagcgaagtcagcctgctgatggatggcgagcagctgcatctcaagcaggtgctggcgctgaccggcgccaaatacagcgacggcaaatacactttttggtcgaaagaccgtaacgcctatcttgagcgcaacggcaaggtagtcatgagcgactgcgtgttgacggagtgagggttgacggcggcgtcggagcgattgagttcctgacgccgcaggcgcagaatgtaacgacggattttttcagttggtcgataacccagatgattgaaaagaatgagtttgatgttgcggacctgcgccgtgaatacacccggggcggcctgcgccgcaacgatctgaccgccagcccgctcgaactgttcgagcgttggttgaaacaggcctgcgacgcgcgccttgcggatcccaccgccatgtgcgtcgccaccgtcgacgaacacggccagccttatcaacgcatcgtgctgctgaagcatttcgatgagcaggggctggtgttctacaccaacctcggcagccgcaaggcgcaacagctggcgcacaacccgcatatcagcctgctgttcccctggcacatgctcgatcgccaggtgattttcctcggccaggcggagcgtctgtcgacgctcgacgtgctgaagtatttcaacagccggccgaaggacagccagatcggcgcctgggtctcgcagcaatcgtcgcgcatttccgcgcgcggcgtgctggaaagcaaattcctcgagctgaagcagaagttccagcagggcgaggtgccgttgccgagtttctggggcggattccgcgtgaaattcgactccgtcgagttctggcagggtggcgcccatcgcctgcatgaccgtttcctgtatcagcgggacgggaatgactggaaaattgaccgactggcaccctgaaggcggaaaatcctctctaagcgctggtgctgatgccgccggcgctttattctatgcgctaccctgaatttttatttcgccactgggcgaaaggccgtgtaccggcaaaggtgcattcgtttatacatggagtcattgatggcaagcagcaacttgattaaacaactgcaagagcggggcctcgttgcccaggttacggatgaggaagcgttagcggagcgactggcgcaagggccaattgcactgtattgcggtttcgatccgaccgctgacagcttgcatttgggccatctggttcctctgttgtgcctgaagcgcttccagctggccggccacaagccggtagcgttggtgggcggcgccaccggcctcatcggcgatccgagcttcaaagcggcggagcgcaagctgaacaccaccgatacggtgaacgagtgggtcgagaagatccgcaaacaggtttccccgttcctcgatttcgactgcggcagcaacagcgctatcgcggccaacaactacgactggttcggcggcatgaacgtgctgaccttcctgcgtgatatcggcaagcacttctccgtcaaccagatgattaacaaggaagcggttaagcagcgcctgaatcgcgacgactccggcatctccttcaccgagttctcctacaacctgctgcagggcttcgatttctccgaactgtacaaccgccaccaggtggagctgcagatcggcggttccgatcagtggggcaacatcacctcgggtatcgatctgacgcgtcgtcagcatcagaagcaggtgttcggcctgaccgtgccgttgatcaccaaggcagacggcaccaagttcggtaaaaccgaaggcggcgcggtctggctggcgccggaaaaaaccagcccgtacaagttctaccagttctggatcaacaccgcagatgccgacgtttaccgcttcctgaagttcttcaccttcatgagcctggaagacatcaacgcgctggaagaagaagacaagaacagcggcaaggcgccgcgcgcccagtacgtgctggcggaagaagtgaccggcatggtgcacggtgcggaaggcctggcggccgccaagcgcatcacccagagtctgttctccggtgcgctgcacgacatgaccgaagcggacttcgcccagctggcgcaggacggcatgccgaccatcaaactggaccgcgacgccgatctgcagcaggcgctggtgaatgccgagctggtgccgtcacgcggccaggcgcgcaccatgatcggctccaacgcggtgaccatcaacggcgagaaacaatcggatgccgaataccgtttcagcgacgcggaccgtctgttcggccgctacacgctgctgcgccgcggtaagaaacactactgcctggtggattggcagtaagcgaataataacggtaaggggccctggcggcccctttatttttgcgcagccgcccggctgccgtattccgaacgagttctgtcgatgaaaaacattctttctatccagtcgcacgtggtgtttggtcacgccggcaacagtgcggctgaatttccgatgcgccgcatgggcgtcaacgtctggccgctgaacacggtacagttctccaaccatacgcaatacggccagtggaccggctgcgtcatgccggccaatcacctgaccgagatcgcgcagggcatcgccaatatcgatcaactgaagcgctgtgatgcggtgttgagtggctatatcggttcgccggagcagggcgaccatattctggcgatcgtgcgccaggttaagcaggcgaacccgaatgcctggtatttctgcgatccggtgatgggacatccggaaaaaggctgcatcgtggcgccgggcgtggccgagtttcactgccgccaggcgttgccgtgcagcgacatgatggcgccgaacctgctggagttggagatgctgagccagatggccgtcaccaacgtggccgatgcggtgcaggccgcccgcgcactgatcgccaaagggccgcggctggtgctggtcaagcatctggcccgggccggctatcacgccgactgttttgaaatgctgctggtgacggcggaggaggcctggcacatcagccggccgctggtggacttcggctcgcgtcaaccggtcggcgtcggcgatttgaccagtggtctgctgctggtggatctgctgaagggcgaggcgctggataaagcgctggagcacgtgaccgccgccgtgtatgaggtgatgctgaccacgcaggcgatgggcgagtacgaactgcaggtagtggcggcgcaggatcggatcgtgcaaccgcgcagcgagttcaaagcggtaaaactgtaagtgcaacgggccccggcgatagccaccggggccgaatgtttacttcaatccttcggcgttcagcgccgcatccaccgccgggcgcgccgcaacgcgatcgaaccaggccgccagatgggcgtgtttgcgcacgtcgaactgcagggcgaacgcccaacgcaacacggtgaacagataggcgtcggccacgctgaaacggtttcccaacaggaagtgctgcttcgccagcaccgaatccagatagctgaactgttgctccagcctggcgcgcgcgatggttttgtattcctcgggcgttttcgggttgaacagcgggctgaatcctttgtgcagctcggtggcaatgtagttcagccattcgatcgcgtggtagcgcgacagggtgcccgccgccgggattaggttgcgatccggcacacggtccgccagatattgcacgatcgccacgccttcggtcagcaggctgccgtcatccagcagcagcgccgggacctgtcccttggggttgatggcgaggtaatcggcgccgctctcggttttcttctgcgccagatcgaccttctccgccgtaaaatccagccctgcctcacgcagcacgatatgcggggacagcgaacaggcgccggctttatagaacagtttcatcggaagctccttgttgatgacgaatgacgggcatgcttaacctctcatcgtagtcccatagcaccaaaattacagcggcttagctaacaaatttaaccgacgatcgcctcggcgggctgcagctgcgccagcgtcgcggcgatctgctgctgcagcgccggcggcgccacctgcatcggcgaacgcaactcgttggcgatcagcccctgctgggccagcaccgtcttgaccggcgccggattcgggaagctgaacatctggtggatcatcggcagcagctcatagaagttgctgcgcgccgcagccagatcgccggcggcgacctgctgcaccaactggacgaaacgttccgggtgaacatgcgcggcggcggagatggcgccggtgccaccgaggcacagcgtggtgaggatcagattgtcttccccggtcatcacatcgatttcgccatcggcgatcagcgccatggtggtgtcagggttgccgccgcagtccttgatggcggtgatgcgcggatggcgtgcgagccggcgcagcgtggccagctccatggcgatgccggtgcgctgcggaatgttgtacaggatcaccggcacggtggaggcgtcggccaactgggtaaaatagtcgatcaggccgcattgcgaagggcggatgtagtaaggggccgggagcagcacgccggcgatgtcgcgcagctgaatggcctgctgcatttgcagcgtggcggccatgttattgccggaaaggcccatcaccacctggcgtgcaggcgccacttccaatacggcgtcgagcaccgccagctgttcttctttgctcagcgcggcggcttcaccggtggagccgcagaccaccagaccatcgatgccggcgttgagcaggtgccgcgccaggcgttgcaccgccggcaggtcgacggcgtcgtgattgaaaggggtaaccatcgccacccaaatacccgaaaatgaggccataaaatattccttctgtgtgaccgacagagaagccagatgagaaaattgaaggcggggcgttgcgtgccatccagtcagctcatctgacgggacagcgcgccccggtcaaatgagcgtctgtttctttgatgtaaccgccgccaaaccgccaaggggcaacgcaggcgtcatcagaatatcagcgttgcgtgggtaggccatggcagtctcgcgaaaaggggaagtggggtgataatgaatattcttcatcaggctgtcaatttacaacagattgataacattgttattcatgattcgccggtgaggatgagtttggctaataaataaaaatccccgccgcggcggggagggttggctcagcgcggcgggcgggagccgatggtggcagaccaactgaaagtgtcgccacttggccggtagcggttggctttgcgttctgcacgctccgccttggcgagcttcgctctggcggccatgatgcgcgccaccacttcatccttgaccttgtgctgttcggcgttggtcagcggcctgccatggcttttacgcgccttgtccaattcggttttcacttcccgctgttcgctttccgtcatctctttcaacgtcaactttttcatctgtgccgcccgttcggtgaagttgacttacagtttagcggcgttatatgaccgaaaatgttatgggcataacgaaaatgccccgtaggccggcattacacctcctccagcagatcgtcgacaaagcgccgcatgcgttcggtgcgctgttcggccatctgccgcccggcggcggtctggaagccttcttgcagcttgaacagtttggtttcgaagtggtcgaggcagaaacgcttgtcgtcgtattgacgatgttcggcccgcggatcggcggcgtcatacagcgcgctgcgcatgcggccgccgatatagaagcagcgcgccacgccgataaggccgatagcgtcgaggcgatcggcatcctgcaggatcttcgcctccagcgtttgcggcgggatgccggcggaaaaactgtgcgcttcaatggcgtgagccaccgccgcgatgtccgccggcgcccattccagccgggccagcgtcagcgtggcttgctctgccgccatgcgcgaggccagatggcgctgcggcgaattcttttccaccgcgacggcgtcgtgcagcagcaccgccgcgcagagaatgcgccggtcgccgccttcctgcttgctgatccgacggcagttcttccagacccggtgcaggtgcgcgacgtcatgcgaaccgtcgtccgactcgagggtgagcggcagcaacgtttgtgccagcgcctggtagggggaaaacggttgtaacagctcttgcgtcagcgagggtaaagacacgttcagctcctgttgggggaaatcggtcaatcagcatagccgtgccggatgccgggaggatgacagtaaaacggctattgtttactaaagtgcaacccactattgtcataactgcggtttttgcagcgaaacaagcaacctagaatagccgaattccgccgtctccgcctggtgagagcctgtgtccgcggggatggccggaatatcctcatcagccatgggagaagagacatgccaacccctcttgaaatagtgcgcgcaacctatgaaggcagctccgaagaaaacggccgcaatctgctggcggcgctggcccccgatgccgagtggaccgaagccgccggtttcccttacgccggtacctatatcggcccggagaacatcatcaagaacgtgcatcagcgcctgggcagcgaatggcaaggttaccgcgccgacgtcgatcacttttacgacgccggcgacaacgtgatcgctcagggtttttatcacggcacctaccgggccaccggcaaatccttcagcgcctcttttgcgcatatttatacgctgcgcgccggcaaaatcgtgaagttcgtgcagatcgtcgacagtgctaaagtgctggaggcgatgcagccttaatcgccgctgcgcttgccgaatttgcggtcaaactcgcgccggtaaccccgggccttgttgcgatcgcggatccacaaatagccgcacaccagcgcaaccgctcccgagaaggtgacgttgcgcatatcccggtcataccaaaacaccaacagcgcatccagcgccgcaatcagcgcgatccatttgtacatatgggattggcgccgcgtggcggcgttgagtcgttttaactgtctggcttcgtccaacaccggtttttgctgcatagcgtttcgttatcgtcaggctgttcacgctaaattagcagaatttccctcaccgtcgcaaagattaacgcgcggcgtcatgcggttttcaccgcccctggcgcggcgcagaaaatttatgcgtgggcgcttgaattgttcattgggcatgataggttatttattcgttatttttgggtttttattcataattcgccgtgtcatcaagctgcagcactgggcggttaacgtgatgggttcgacgcatgcggcggttaacttcggcaggaggatgtgatgaacgataaaacggcacgcccgcaggatgtggttcaacaacagcttgacgcctataacgcccgcgacatcgaggcctttatggcctgctgggcggacgacgcccagtattacgagcatccagacacgctgctggccagcggcaaggcggcgatccgtgaacggcatctggtgcgtttccaggagccgagtctgtatggcgaacggataaaacgcatggcggtaggcaatatggtggtcgatcaggaggtggtgacgcgcaatttcccgcaggggcgcggcaaaatggatgtcatcgccatctatgaagtggaacaggggaggatcgccaaagcctggttcaagatcggcccctgcgtgccggatgagggcgcgctctagccgcgcattactgcaacgccatcaccgcctctatttccacacacaccgcgggtgagaacaacgcgctgaccgccatcagtgaacaggctggcagcgcgccatcgaaatagtcaaacagcaccgggcgcacgcccgccagatcggcgatgtcggtcaggaacacgctgattttaatcaatgctttgaggttgacgccttcgctggcggcaatggtggccagctgttcgaggatctcctgcgtttgctccggcgcgctcaatccctgagcgtcggtggcgtaggccgtcaagccggaaacgtataagcgatcgccgtggcgcaccgcatgcacataggggccgcccggcgtcggcaactgcggataattcgtgcgttttaatgatgtcatggtcaaaccccgcgcaagaccggttaataaaatcgacaaacttggttaggatactgaagaaacggcggccaggcgccgcgcaccgatgatatttgagagtatcatccctctttattttatacgtcgtcttcacccgaatgtgacagtgcggcgcagctcggccacaaggacgcatgagacgatgaacccgatttttactccctacctgcaacgctggcaactggaacaggatggcaaagccttcgaaacccacagcagtctgctgatgccggtgcgttaccggggcgaggccgccatgctgaagatcgcccgcgagcaggaggagcgcttcggtggccggctgatgtgctggtggcgcggggaaggcgccgcgctggtgctggcgtggcacgacgacggcattctgctggagcgcgcgcagggcgaaggttcgttggcgcagctggtgcgtgatggcgacgatgaacaggccacgcagatcctgtgccgggcgatcgccgccttgcatgcgccgcgagaggcaccgctgcccgaattgatcccgctgcaggagtggttcagctcgctgtggccggcggcgcaggcgcacggcggcatgctgcgcctcagcgccacaacggcggcggaattgctgagcagcccgcgagaagaaagcgtgctgcacggcgatatccaccatgacaatgtgctcgacttcggcgaacgcggctggctggcgatcgaccccaagcgtttgtacggtgaacggggcttcgattacgccaatatcttctgcaatcccaactacggtatcgccaccgatccggccattttccagcgccgcgtggaacaggtgtgccggttggccgggttggatcgccggcgcttgctgcaatggatcctggcctggtcggggctctccgccgcctggttcatggaagacgggcaggcggctgacattgactttcgcgtggccgaactggcggcgcgcgcgttggatatcccgttgccggacggcgattcagggttcatcctgccagtaatcgagcgaggttgaagggcgctgcaggtagcgcacctgctcgccgtctgcgctgcgcgccatcgcctggtatttgccggaatccgggtacatcaccagctccggctgttcgcgcgtgctgacggacaggtacttcagcggcgcatcggaagtgttgatgatctggtgcgggtattccgggcccggcggaatgaaaatgacatccccgctgacgatcggcagcatttctccggccactcgcagcgtaccgctgccctccagaatgatgaacatttcctcctgagcgtagtgaaaatggtaggggcaggaacgcatgcccggcgccacacaatcgaaagaggcgcccagcttgtcggcggcggtgccggtgccgagacgggcgccgacgctgtcatacaacggcggccgccggtcatgtttcatctctacctgttcgacattgcgtatcaggcgctgagccaacagcgcggctttctcagtcataagcttccttggtgacggcgtcacttattaggtgaattgacagtcagacgacagagaaagtgaaggcgccacggcgtcgcttgtcaatgtagaccgcccgttacgcctcggaggttcgccgcggcagcgacagcagcagatgggcgatggcgccgccgacaatgccccagaaggccgaaccgatgccgagcagcgtgacgccggaagcggtgatgaggaaggcgatcagcgccgcgtcgcgctgtttttcatcatgcagcgcgcgttgcaggctgccgccgatggtgccgagcaacgccagcccggcgatggtgtggatcagggcgtccggcaacgcgctgaacagcaggccgatggcgccgccgaacagcccggccagcaggtagaaaccgccggcggccaccgcgcccatatagcgccgctgcggatcgggatgcacgtccggccccatgcaaatggcggcggtaatggcggcgatgcacaccgagaaaccgccgaatggcgccagcagcagcgcggtcagcgccgtccaggcgatcagcggtgaggtggggacacggtaacccgccgcctgcagcgtagcgatcccgggagcgttttgtgaagccatggtcaccacgaagaagggcacgccgatgccgagcagcgtcggccagctgaaatgcggcgcgataaattccggcacggcgaacgccggcgtctgttgcgtcagctggatatcgccctgcagcgcggcgatcgccagcccaatcgccagcgtcaatacgatggcgtagcgcggcaggtaacggcggctgagcagataggtcagccccataccggcgctgaggaggaaattgagctgcagcgaagcgaaggcgtccagcccgaaacgcagcaggatccccgccagcatcgcggcggaaatcgcctgcggaatataatccatcaggcgagcgaacagcccggtgacgccgcagagcaggatcagtcccgatgcgaagataaacaccccgatcgcctcgttgatcggcgtgccgggcaggctggtgaccagcagcgccgcgccgggcgtcgaccaggcggtgaggatcggggtgcgatagtaaagcgacagcccgagggaagtgacgcccattgcgatcccaagtgtgctcagccagccgccgatctgcgccggcgtagcgcccgcggcggcggcggcctggaaaatgatggcggcagagctggtgtaaccgaccagaacggcgacaaagccggccatgatggcgggcagggtcagatgacgcagggtgacggcagggcgcatgagcagctccaatcggtggttgtgcgttataacgcacggcaagaaatcagcatagcatcgtgcgctatagcgcacaagcgggtataatctggctcgacacgcagaggagaactggatgcaggaacttgccggccatttggcgcacacccttcgcacgctgcgcgcacagcgcggctggagcctgacgcaggcggcggaatacaccggcgtcagcaaggcgatgctcgggcagattgaacgcggcgagtccagcccgacggtggcgacgctgtggaagatcgccaccggtttcaacgtggcgttttccgcctttcttgaggcctcacccgcccagcagcaggcgacgttgcaccgctatggcgatctgccggtatacgatcaggacaacgccgacatgcgcgtggtgccgctgtttccctacgatcgccagctgggtttcgatatgttcgtcatcgatctcgcgccgggtgcgctcagcgaatcgtcgccgcatgagccgggcgtgatcgagcatgtgatcgtgatcagcggccgattagaattggcgatagacggcgcttggcacagcctggcggccggcgaggcgatgcgctttcaggccgatcggccgcatgcttaccgcaacgccggttcgcaaacggtgcgcatccacgatctgatccactatcctcaatcctgattcaacgcggcggccatgggctttgactccgtgccgccaaacgcctaccttgttgaaaatgactcttatttcacaggctgtcgcccatgacggggcggcgttgcagccgactcaaaaggagcttgattttgccggtcaccaatcgacgtcagttcattaaactcagtgcgcaaaccgcaggagccgtattcgcgatgacttcattacccaacagtatccgcctggcgatggcggcggagggcggcgcggccgccggcgatgaattcctgtggctggaagagctgcagggtaaaaaagcgctgcactgggtgcagcaggaaaatcaacgcaccgtggcacgtttcggtcagggcgaagactttcagcgcattgagcgcgaagtcctggatatcctcaataaagacacccagatcccgtgggtgagcaaacgcggcgagtactattacaacttctggcaggatcaggccaacccgcgtggcctgctgcggcgcaccacgctggacgagtaccacaaggccaaaccggcctgggagacggtgctggatatcgatgcgttgggcaaagcggagggcaaggattgggtttatcagggctcgcaaccgctggcgccggaataccgttattgcctgatgcagctgtcgccggacggcggtgacgccaccgaaatccgcgaattcgatctggttgccaaacgtttcgtcaaagacggtttcaacgtgccggtggcgaaaagccgggtttcctgggtcgatcgggacacgctgttcatcgccaccgacttcggccccggctcgatgacccagtccggttatgcgcgcatcgccaaacgctggcggcgcggcacgccgctgagcgccgccgaaacgctgtacgaagcgcagcccgaggacatggcggtcttcgcctatcacgatcgcacgccgggctttgagcgcgatttcgtcggccgcagcctggacttctatcgccgtgactatttcttgctggctcaggatggtcggcagaaaaaaatcgacatcccggccgacgccgagctggacacgcatcgggaatggctgctgatcaaaccgagcagcgactgggaagtgggcggcaagcgttatccgtccggcgcgctgctggcggccaacttcgatgactatctggcgggcaagcgcgagctgcagctgctgtttaccccgacggcggagcaggcgctgagcggctacagcggcacccgcgatcacctgatcctcagcatcatggataacgtggtcaaccggctggaggtgctgacgccgcagggcggcagctggcagcgtcgtccgctgggcaaccccggtgccatcagcaccctttccgccggcggcatcgacgaagagagcaacgcctatttcctgaccgtcagcgggttcctgcagccgacctcgctgtatatgggtaatctcgacggcggtgaggcgacgctgctgaaacaggcgccgcaggactttgacgccgccggctatcaggtcagccagcatttcgcgcgctccaaggacggcacccgcgtgccgtatttccagatcgccgccaaagatctcaagctggacggcagcacgccgacgctgctgtatggctacggcgggtttgaagtgccgctgttgccgggctatctcggcggcaaggcgccggcctggctggagcgcggcggggtgtacgtggtggccaacatccgcggcggcggcgaatacggcccggcctggcatcaggcggcgctcaagcagaaccgccatcgcgcctatgaggatttcgccgccgtggccgaagatctcatcgcacgcaaggtgacctcggcgccgcatctcggcgcacgcggcggcagcaacggcggcctgctggtgggcaatatgctgacgctgtatccgcagctgttcggctgcatcgtctgcgaagtgccgctgctggacatgcagcgctatacccagctttccgccggcgcgtcgtggatcgccgaatacggtgatccgagcaagccggaggagtggacctacatcaagaccttctcgccataccacaacattcaggcgcagacggcctacccgccagtgctgttctataccgcgaccagcgacgatcgggtcaacccggcccacgcccgcaaaatggcggcgcgcatgcaggcgatggggtatcagcaggcctatttctatgaaaataccgaaggcgggcacagcgccgccgccgacaagcagcaggcggcgttccacagcgcactggtaagcgaattcatgtgggccaacctgagcggcaaacccaattcagcgtaagcctttttcttgcggcataaaaaaacaccggggcgttaaccccggtgtttttatttacgctcaatccgccggcggtcagcgagccgcagcggcttcctgcgcttgctgattggcgtcttcggtggtgtccagcgtcatgcggtacagcttcggcgcagtcagcatcatcaggatagcgatgacggcggtgacgatgccgatctgcataaacacatggctgtagatggccagcgaagcgtgcgcgtcgttgatgtcgcttggcacggcggtcagaccggcaaccttaccggcgatcagcgcggcggcggcggtagtcaggaaccaggagcccatgatgaagcccatcagacgctgtggcaccagctgtgccaccatcgccagacccaggccggaaatcatcagctcgccgatgctctgcagcgcgtagctcaggatcagccagttgaccgacacgatgccctgttcgttggcgaagctggcgccccatggcagcaccaggaaggcgcaggagcagaggatcatgccgaaagcgaacttgtgcggcatcggcaggcgatcgcccattttgttatacagcgcggccagaatcgggctggcgagcatgatccagaacgggttcaacgcctgatactgctccggctcgaaggcgacgccgaagatgctgtgttccacgttatggatggcgaagaagttcagcgaggttggcatctggctgtacagcacgaagaacaccaccgcttccagcatcagcaggaaggcgacgatcatcttgcggcgtgcggcgccgtgcagggcgaaggtttccttggcgaacaccagaacgataccggcggaaacgagggccaacgcccagcgcgcgatcacctggttgtgcagcagccagctggacacggcgatcaacgccacgatgccgaccagcaccatcagcagcttcggcagatgcagcggcttgaagtcaggtctggagccgttttccttcacccacttgtggcacatcataaagttgaccagggtgatcagcatgccgaccacgctcagggagaacgccacgctccagccgtatttcgccgccagccacggggtggccagcatggagaagaaggaaccgatgttcaccgacatgtagtacatggtgaaagcgccgtcgatgcgcgggtcatctttctcatagcaggtggacagcagggaggacgggttagccttgaacaggccgctgcccacggcgatggtcgccatgcccatgtaaacccagaagatgtcgtggccggagtaggccaccatggcgtaaccggcggccagcaccagtgcgccgagcacgatcacgcgtttggcgcccagcaccttgtcgcccagccagccgccgatggcgacgaagccgtataccagggcgctgaaagaagagaacagggtgatggaatcggcttcgctcatgccgagcatcttgaccagataaaccgccatgatgccctgcaggccgtaatagccgaaacgctcccacagttcgatcgagaagatcaggtagaacgctttcggttgtttgaacgcgttaaggctaacgctctccgggtgttggttgtttgctgttgacactggtacctctgttttttcgcagcccgtctttggaggacgggaaagtacaaaagttgatgcggaacggcatccttttgcgttgttataggatggggacggcggttaatgttcactatctttgtcaacgtggcaagcagtttgtcatattcggttacatttaacgctcgcaggattatgctgcgatgttgcaaatgttatgcagtattaactttcgggttttaatggtttgccgattttttgttttgattaaaagctatacggattttaaacagggatatattctgctgaattgctattttttagcgcatcagtgtatgtgtggttgttaatccattggaatgttgtgcatatgcagcgttttgtaaaattatagaaatttaggaaaacgggactggcatttgtgaacgccttgtgatcctgaaagcgtgacgttcaccgcaatttttgactaatttttcgcttgaaaataacgcggcactgagtttttcactgaaaaccgcgataacgccggggttactgctgcgcgatatcacatttccgataaaaaagaggcgctggcggggggaagtggcggcgacgggggcggtttgccgcacccgtcagattcaggattccggataaaccttctctttatactcgcacaggtcttcgatgatgcaggagccgcagcgcggtttgcgcgcgatgcaggtgtagcgcccgtgcaggatcagccagtggtggcaatcgaccttgaattcggcgggcaccaccttcaacagcttctcttccacctgatcgacgttcttgcccggcgcgaagtgggtgcggttgcacacccggaagatgtgggtgtccacggcgatggtcgcccagccgaaggcggtattgagcaccacgttggcggtcttgcggccgacgcccggcagcgcttccagcgcggcgcgatcttccggcacttcgccgccgtgcagctccagcagcatacggcaggttttgatcacgttttcggccttgctgttgaacaggccgatggtcttgatgtactccttgacgccatcaacccccagcgccagcatggcggcgggggtgttggcgaccgggtaaagtctggcggtcgctttgttgacgctcacgtcggtggcctgcgcagacagcagcacggcaatcagcagttcaaacggcgtggtgtacaccagctcggtggtcgggtgcgggttgttgtcgcgcagccgggtcagaatttccagtcgcttctgcttgttcatcaggccttctcagcacgtccttgttccagcagcggttccgccgccacggcgcgggctttgcgcgccttcattttttcgtcgatcagatacttgaccgccagcagcagccccaggccgataaaggcgcccggcggcagcatcgccagcaggaatgggctgtcgaaatgcaccacttcgatgcgcagcgacttggcccagccgcccagcagttggtcggcgccgtcgaacagcgtaccgttgcccaacagttcgcgcatcgagcccagcgtcaccatcacgccggtggcgccaaggccgatggccatgccgtccagcgccgagaggccgaccggcttcttggcggccaccgcttcggcgcggccgaccacgatgcagttggtcacgatcaatggaataaagatgccgagcgactgatacaggccgaaggcataggcgttgatcagcatctgcacgatgctcaccaccgcggcgatgatcatcacgtagatcggaatacgcacttcgctcggcacccagcggcgcaccgcggagatggaggcgttggtcagcgtcagcaccagcgtggtggccagccccaggcccagcgcgttggtgacggtggaggtcaccgccagcaacggacacatgcccagcaactgcaccagggcggagttgtttttccacaacccctgaacgatcaattctttggcttcactcattcggcggctccacacgcaggtaagctttcaagtttaggcggcagcgtttccatatacaacgccgtgcggcgcaccgcattgaccaccgcccgcggggtgatggtcgcgccggtgaactggtcgaacatgccgccgtctttcttcaccgcccagcgtttgtcgtccgggccgtcgattttcttgccgctgaagaaggaaatccagtcggaaatgcgcagttcaattttgtcacccagcccaggcgtttcgtggtgttcaatcacccgggtgccgagcaccgtgccgttgaaatcggcgccgaccagcagcttgatggcgccggagtagccgtccggcgcggtggtttccagcgcggcagccgtcggctgcccgtttttgcgcgccaggtacaagcggtgcggcgcgccgtcgcccagcgccggatcgctgaccagcaggcattcgttctgcatgatgttgtcgtagttttccggcggcaccacctgatcgagcagcgctttttgctgcagcgccgcctgatgggcgatggtggttttcgtcagggcgtaaaccacggcggtcaggccggtggtgaccgccgcaaacaccgccagcgtggtgccgtgctttctcatggaattcagcatggcggctccttagcgatggccgtacacgcgcggctgcgtgtagtggtcgattaacgggacggtgatgttggcgagcagcacggcgaaggccacaccatcagggtagccgccatagacgcggatcagccagaccagcacgccgatcagcgcgccgtagattaagcggcccttcggcgtggtggcggcgctgaccggatcggtggcgataaagaacgcacccagcatgctggcgccggagaacaggtggatcagcggtgaagcctgatgcgccggatcgatccaccaggccagaccggaacagaaggcgatggcggccaacatgctgaaagggatttgccaatggatcaggcggcgcgccagcataaacaggccgccggccaggaaaccgaggttgacccactgccagccgataccggccagcgcgccgccgaacagcggctgctgcaacacctgttccacgctgtggccgctgcgcaggccggttttgaagccgtcgagcggcgtggcctggctgatgccgtccacgcccatctgcagttcgtgcagcgtcgcgccctgtgcggtatggccgctgaaaatcgccagcagcgtgtcgtggagcgaaagcgcggcggcgcgcagttcatccggcggcagccaactggtcatctgcaccgggaaggagatgagcagcactacgtaaccgaccatcgccgggttgaacgggttctgcccgaggccgccatacagctgtttggcgataacgatggcgaagaaggtgccgatgacgatcatccaccacggcgccagcggcggcaggctgatgccgagcagcagcgcggtcagcagggcggagttatccgccagccggctgcgcaccggcagcttgcgcagcttgaggatcgcgccttctgcagccagcgcgacgatcgccgccagcgccacctgaatcagcacgccgtagccgaaaaaccaaatctgcgccgcaatgccgggaatgcacgccaacatgacccatagcataatgcggctggtgctttgctggttgtgggtgaaaggcgagctggcgatgtgtaagcctttggcggctgtgggtgataccggcctgaacttcatagagtaacgataccttctgcgccgcgcctgcggcagtttcgatgcgccatactgcgggcgcggcaaaaatgatagccgagcattctacctgattcgatgcgagggtaatacgccttaatgataggggtattcggctttccgcacatctggcgatcggggtggcgcgatttgatttttttttggccgggaaatgggctaacgtgaggaattgtcagtggaacttgtgccgccatcgaccgcggaaaatggggtaaacgtctgaatgagatatcatttttctccagatttccgcacaaaataacaactttcacataatccgtgtaggttactatcgcgaacattattgagtcagtgaatccataataatgacaaatgaagacattttttttattgaagagctaattgagtgggtggagatacatctggagaaacggccaaacctggatgaagtcgcgcgtatttcgggctattccaagtggcacctgcagcgtaaattcaagcgtattaccggcattcaactcgccacctatatccgttcgcgcatcctgacgcgcgccgcggtggcgttgcgcattactcgtcgctccatcatcgatatctccgatgagctgggcttcgactctcagcagacctttacccgcatgttcaagcagcgcttcggcactacccccaatcgctaccgctcgatggagcactgggacgtgaaaaacctgatgccgcgctttaacttcgaagccagctacggcgccggttattacccggaagtgaagcggctgacgctgcccgacatgcagctggtcggcttcactcgtcggctggatttcgcctccgaacaggaactggagtactcttcctgcatggcgatgaaggatgagattttcaacgacttcttcaaggggctgcacgtcgactgtcggcggatttacagcatctactcccctcatgccggggagggcgacgagctctcatccacgctggtgatggcggtcgatcctgaacacagaaaggatattctttccaaccatcagatagacaccttccatttgccgagccgcgagtttatctctatcaaccataaggggtcggcgaaagagtgtttgcagtttttcggctacctgatgtcgcatgtgatgccggggttgaaggataaagtgcgcggcagtatggaaatggagatcattcaaaccaaagagtggaatcctgaatccaaactgcgtcagattgaagtggattacacctacctgatttctatcgattaaacggcgcctggcgtcagccgggcgccgctatcattatttgtcttccgtttccgccgccagcgattctctggcggcttttttggccttggcgcgggcgatagccgccgcgaccgccgccttgcgcggatcttcttcggctgcagccggcgccggttccgtcggtgcagggtcatccgcctgctgcgccgctttcttggccttggcgcgggcgatagccgcggcgaccgccgccttgcgcggatcttcttcggcggcaaccggcgccggttccgtcggtgcaggggcatccgcctgctgcgccgctttcttggccttggcgcgggcgatagccgccgcgaccgccgccttgcgcggatcttcttcggcggcagccggcgccggttccgtcgatgcaggggcatccgcctgctgcgccgctttcttggccttggcgcgggcgatagccgccgcgaccgccgccttgcgcggatcttcttcggtggcagccggcgccggttccgccgatgcaggggcatccgcctgctgcgccgctttcttggctttggcgcgggcgatagccgccgcgaccgccgccttgcgcggatcttcttcggctgcagccggcgccggttccgtcggtgcaggggcatccgcttgctgcgccgctttcttggcttttacgcgcgccagtgccgccgcgaccgccgctttgcgcggatcttcttcggctacagccggcgccggttccgccgatgcaggggcatccgcctgttgcgccgctttcttggcttttacgcgcgccagtgccgccgcgactgctgccttgcgcggatcttcttcggctgcagccggcgccggttccgccgatgcaggggcatcagcctgctgctctgcctttttggccttcacgcgcgccagggcggccgcaacggccgctttacgcggatcgtcctctgttgccgccggggcggggctgtctgctgccggcgcctctttgcgcgctttcacgcgggccagcgccgcggccacggcggctttacgcgcgtcgtcgccggcggtcgccggtggcgcttccgtttccacctcggcagccagctgggcacgacgttcgcgcgcctgcgctttacgtgcttcgcgggcagcgatcatctcgctgttatccggctgctggccgttgaccggcgtaaccgccgcttcggcattcttgctgcgcacgcgcgccagcgcggcctgcactgcgccctgatcgtcgtcgttcagtttgacggcggcctttttatgtcgctcttcacgcgccagtttttcacgctccagacgcgccagcttggcctcgtaacgcgccttggcctcggcggtgcgcgccgcttccagatcgatagccttgatttcggccttttcctgccggtagtactgtaccagcgggatattgctggggcagacgaacgcgcaggcaccgcattcgatgcagtcgaacaggttatggttgcgcgccttgtcgtgctcctgcccgcggctgaaccagtacagctgttgcggcagcagcccggcagggcaagcgtctacgcacaggccgcagcggatgcaggactgctccggttcctgcggcgtcatttcatccaccgtcggtgccagaatgcagttgctgatcttgacgatcggcacgttcagcgcgggcagggtgaagcccatcagcgggccgcccatgaccaccatctgctgcgcctgcgggcggaaaccgacgaagtcgagcaggtgctgcaccggcgtgccgatgcgagcccacagattgccggggcgctcgatcgcctcgccggtcagggtcactacgcgctcaatcagcggttcgccgtcgacgatcgctcgcttgatggcgaaggcggtgccgacgttttgcatcaatacgccgatagcggaggagtgcttaccgtgcggcacttccttgccggtcaaaattttggtcagctgcttggcgccgccggacgggtatttggtcgggatgacgcgcagcgcaatgccgggctggccgcgcaacgcctgtttcagcgccgcgattgcctccggtttattgtcttcgatgccgatcaacgtgagcttgggttgcagaatgtgttgcaggatctgcgtgccttcaatgatctgatcggcatgttcctgcatcagacggtcgtcggcggtaatgtaaggctcacactcggcggcgttgaggatcagcgtttccacgccgttcatgccgccttgcagtttgctagcggtcggaaaacctgcgccgcccaggccggcgatgccggcctgatgaatacgttgaatcagttccgcggcgggcgattggcgatagtccgccaccggatcgcgctcgcaccagcggtcttccccgtctgcctcgataatcacgcacagctccgtcagcccggacgggtgcgcggtgatgtgcggcgtaatggcgctgacggtgcccgaggtcggggagtgcaccggcacggtgcggccgcggccgacggtcagcggctggcctttcaacacccgatcgccggcgctgacgcacagctcgccttccggccccagatgctgttgcagcggaatgataaaggtcttgggcaggggcgcgacacgcagcggcgcaccgctggactgcgttttcatttccggtggatggatcccgccgtcgaaatcccagatccggtcttttttaaaggcggcgaacagattaagcatgttgctccacgtggatcacttgcaccgggatcgtcttcatgtcccacttccagttggcggtggtggtggcgaccggtctcatttcaatacagtcggtagggcaaggggcgacgcacagatcgcagccggtacagaggtcggtaatgacggtatgcatggcgcgggtggcgccgacgatggcgtccaccgggcaggcctgaatgcacttggtgcagccgatgcagttggcctcgtcgatataggccactttacgctccggctcggcggcggcttcgctgcccagcggctgcggctcgacgttgagcagctccgccagtttcagcatcacctgttcgccgcccggcgcgcatttgttgatcatctcgccgttggccaccgcctcggcataggggcgacagccggggtagccgcactggccgcactggctctgcggcaggatcgaatcgacctgctcggcgaccggatcctcttccacctcaaaacggcgcgcggcgtagcccagcaccagtccgaacagcagcccgagcgcgcttagagccgcgatagctatccacaacgcagtcattagaatttcaccagcccggtaaagcccataaaggccagcgacatcagcccggcggtgatcagcgcgatcgaggagccgcggaacggcgccggcacgtcggccaccgccagacgttcgcgaatggcggcgaacagcaccatcaccagcgagaaaccggcggcggcgctaaagccgtaaacggcggactgcaggaagttgtagccgaggttgacgttaagcagcgccacgcccagcaccgcacagttggtggtgatcagcggcaggaagatgcccagcaggcggtagagcgccgggctggttttgcgcacgaccatctcggtgaactgcacgacgacggcgatcaccagaatgaaggagagcgtgcgcaggtacaccagatccagcggaaccagaataaaggtgttgatcacccaggcgctgacggaggccagcgtcatgacgaaggtggtggccattcccatgccgatggcgctttccagcttcttggaaacgccgaggaacgggcacaggccaagaaacttcaccagaacgaagttgttcaccagtacggtgccgacaaacaggagcaggtattcggtcattgcgatgcctaaaaaaataaaagccgcctattatcgggaatcggcggccggacgacaacatatgaatcgcaggggtattgccttttttggcgaaaatttacacaaaatacccgataaaacgtgctgcaaccgcctttaacgttcggtaaaggtgcctttgacccgctgcgagcgcttgatataaggcaccagcagcgccgccatcagcagcggccagccgaggctgcgcaccgccacttcatccggcaccggcgcgaaggcgaaggctttcaccgccaggatcaccgtgatcagcagccataacaagaacagtttagggaagcgctgcgaccgatggcagaacagaaacaccagccacagggtaaagccccacatcaagagcgtggtcagcaccgaaaagtaccattgcagggtaaacgcctgggcgttggtcaacagatagtcgcgcgactcgggcatgaagatcgccatggcgtacaggagcagcatcaggctggcgctgagcagggtaacgatcagataggccagcggggccagcaaccaaccgccgatacgagagtattcagcttgagacattaaacggcttcctgattgaatcggggatcacaggcggcatagcttagcgggtaatataggcttcgtcatctctatcaagcggatagctcggcatcgcgacgccgggccgcacgtttggctactccggcctcgctttgaattaacatctcatttacttcttgttccatccggccgcatggtgtcaaatcgaaagggtctgtcgtgagcctgcaagaggaaatcccatggctgaaaaaattcgtgtcgggctggtcggttacggctacgccggtaaaacctttcatgcgccgctaatcgccggtacgccggggctggaactggccgccgtttccagcagcgatgccggcaaagtgcacgccgactggccgtcgatgacggtggtgggcgatgcgcaagcgctgttcgccgatccggccctcgatctgatcgtcattcctacccccaacgatacccatttcccgctggcgcaacaggcgctggccgccggtaagcatgtggtggtggataaacccttcaccgtgacgctgtcacaagctcaggcgctgcaacagcaggcgcagcagagcggtttactgctgtcggtgttccacaaccgccgctgggacagcgatttccttacccttaaggcgctgctgaacgacggttcgttgggcgaggtggtgtatttcgagtcgcatttcgatcgctaccggccacaggtgcgccagcgctggcgcgaacagggcggcgccggcagcggcatctggttcgatttggggccgcatctgctcgatcaggcgctgcaactcttcggcaaacccgagcggctgttcgtcgatctgggtgagctgcggccgggggcgcaggcggtggactatttccacgcgttgctgaactatggcgatcgacgcgtggtgctgcacgccagcatgctggcggcggcggagagcccgcgctacgtggtgcacggcacccgcggcagctacgtcaaatatggcctggatccgcaggaggaccggttgaaggccggcgagcgcttgccgcaggccgattggggctatgacatgcgcgatggtgtagtgacgctgtcacgtgacgatctgctggcggaacagccgctgctcaacattcccggcaattatccggcttattacgcggcggtgcgcgacgcgatcgccggcataggcgaaaacccggtgccggccgccgacgccatcgcggtgatggcattgattgaactggggttggaatcggcccggctgcagcaggcgctgccggtggtttgataccgcccatttctctgtgcccggcgcaacgtcgggcctttttacgactttacgtgcaaggaaattcgtttcatgtcctggttgcagcgtttgcgcattgataaatttttgctggttctgattttggtggtgatcgtcgcctcgctgttcccctgcgaaggcatctggaaaaccttcttcgaacatctgaccaccgccgccatcgcgctgctgttctttatgcacggcgccaagctgtcgcgcgaggcgatcgtcgccggcatgagccactggaagctgcatctgctggtgttcctcagcacctttgcgctgttcccgctgctcgggctggcgatgaacctgctggtgccgggcatcatgacgccgacggtctatctcggcttcctctatctgtgcgcgctgccggccacggtgcagtcggccatcgcttttacctcggcggcgggcggcaatgtggcggcggcgatctgcagcgcctcggcgtccagcattcttggcgtgttcctgtcgccgctgctggtgggggcgttgatgcatacccagggcggcaataccgacgtgctgcacgccattggctcaatcattctgcaactgatggtgccgttcgtgatcggccatctggcgcggccgctgatcggcaagtggatcgaccgccatcgcaaactgattaacctgaccgaccgttcgtcgatcctgctggtggtgtataccgcgttcagtgcggcggtggtggaagggatttggcaccgtatcgacggctggtcgctgctgaccatcctggtgatgtcgctggtgctgctgacggtggtgctggtgatcaacacctacgcggcgcgctggctgggcttcaacaccgccgatgaaatcaccattgtgttctgcggctcgaaaaagagcctggcgaacggcatcccaatggccaacgtgctgttcccggccgcggcggtgggcgccatggtgctgccgctgatgattttccaccaggtgcaactgatggtgtgcgcggtgctggcgcagcgctatgcgcgtaaaaccgccaaacagcgggccgaggcggaggcgctggcggccaaataggccgcaggccgctaacggcggcccagcgcgtcgagcagaaagtcggcgcgctcatcgggtgaggcgcgcggcagctctcgcagccgatagccataacggcgatagatggccaccatcgcccgataggtttgctcggcttcggcgaaagactgttttctctcgctgtcctgcgcataaatcgctcgccacggcggggcgatgaacaccgtatcggcatagcgaaaggcgtcgatcgccgccgttaagggggcggggatcgataatccgcacagcgtcaggtaaccggcgatatccggcaggccacgatcgaagaaccagcatgttgcgcccgtcgcttcgcgccatgaacgcagttcccaatcgagcatccgctcggcgaaagcctggcgatcgccccacggcagcgcattgccgccaatactcacctgatcttgaataatcgcccggcccgcctcctgggaatgcgggtaaccgcggcgatgaagaacgtcgatgagcgtgcttttgcccgaacccgggccgccggtcagcacgatacggcatagtttgtcagacatgcggaattcctctcttgcaacagagtgatggggtgaaaacagcgataaagacgagcaggcggaagaaaacggggaatgagaagaaggcgccgtttggcgcctggggagattagccctgaactttggcgcgcagcgcctgtttttcctgctcgctgaggaaagccagcttcaggccgttttcctgcgcggtgcggatttctgccggcgtcagcccggcctgcggcgcggcgacgcggtactcatgctcgatctcgatgccctgaaccgccggatcgtcggtgttgatcgacgccagcacgccgtggcgcaggaaggtggccagcggatgctgcgccagcgacggcacggtgctggtttggatgttggaggtcaggcaggactcgatgccgatgccgtgttccgccaggaagtccatcagcgccggatcttcgaccgctttcaccccgtggccgatacgttcggcgcccagctcgcggatcgcctgccagatgctttccgggccgccggcttcgcccgcgtgcacggtgatgcgcaggccggcgtcgcgcgcacggttgaagtgactgaggaacaggctgccggggaagcccagctcatcgcccgccaaatccaatgcggtaatgccgtcgcggtgcgccagcaacccttccagctcctgcaaacaggcggcctcgccaaaggtgcggctcatgatgccgatcaggcgaatgtcgatatcgcgatcgcggcagcccgagcggatcccgtcgatcaccgcttccaccacgccggcgaccggcagctgatgcttcatcgccatgtagtaaggggaaaaacgcagctcggcgtagtgcaggccggcgttggcggcgtcctcgacgttttcgtaggccacccggcggcaggcgtccagatcgcccagcaccgctatgccccagtccagtttctgcaggaagctgaccagatccggttcggcgtgggtgatctgcacgtgcgggcgcaggctctccaaatcgttggccggcagggtgaggttgaactggcgaccgaggtcgagaatggtctgcgcgcggatgttgccgtcgagatggcggtgaatgtcggtaagcggtaggcggggatcgatcatgctgggcactcgctaatttatcgtaggtaaagtgcagaacagtataaaaacaaatgaatgaaacttgccatctcgttgcataaaaaagtgacttgcatcacaaataatgcgaggagtatcgcattatcgtcgtgaatcaggctttcaacacgctgacgcccgcctgctgcaacggcgcgatcaatgcgtcgtcggtggcgcgttcaacgatgatggtatgcgccagcgtaatgtcaccgatcgcatactgcgaggcggcgttaagcttggcggcggaggccagcaccacggtttccgccgcgcgggccgccagtgcccgcttgatgtaggcctcttccagatcgccggtgctcagccccgcagtggggtgcacgccggtcacgcccataaaataaatatcggcgcgaatatgcgacatcgcttccaccgcggcggcgccgacgctgacgatcgaatgcttgtacaacctgccgccgatcaggatcacctccaccgtgggatgatcggccaggcccacggcgacgctggggctgtgggtgacgatggtggcgttcaggctgagcggcagctgcctgaccagctcggcggaggtggtgccgccgtcgatgatcaccacctggccgggggcgatcagcgccgccgccactttggcgattgcgcgtttggcgccggattccaactgattgcgttcggcgaagctggcgatggcggatgaaaccggcagggcgccgccgtgcacccgctgcagcaacccctcggcgtccagttcgcgcaggtcgcgccggacagtgtcttccgacagcccgaacagctcgctgagctgcttggccaacacctggccgtcctgagccagtttctccaggatgattttcttgcgctggctggtcaacatggccatttttccctcaaatttgttttgcacgaaatatcttgatcatacacgaaactgcacgatagtatcaatttccttcctctggcggagtaaaccgatgatagccaccaaagacagggttcgcattgtcgaaacccgggtgttgtccgatgactggtacctgctgaaaaaaaccacctttgattttctgcggcgcgacggcgtctggcagcggcaaagccgtgagacttacgatcgcggtgacggcgcggtgattttgctgttcaaccggcaggcgcagacggtgatcctgacgcgccagttccgctttccggtgttcgtcaacggtcatgacggcatgctgattgaggccgccgccgggctgctggacaacgcgtcgccggaggcgcgcatcagagccgaagcggaagaggaaaccggctatttcgtgcagaacgtggagaaagtgttcgaggcgtacatgagcccaggttcggtcaccgagaagctgcactttttcgtcggtgaatatcaggcgggcgatcgcgtcaacgagggcggcggggtggcggcggagggcgaggatctggaggtgatcgagctgccgctggcgcaggccctgcaggcgattcgtcagggcgcgatcgttgacgccaagaccatcatgctgctgcagtttgtcgccttgaaccggacgttggaggaagaacgatgaaagcacaacaaatcctgatcgccggcccctatcgcagcggcaccgatggcgatccgcagcgtatcgccgccaatctggcgcgcctggaacaggcggcgctggcggtttacctgcggggacacgtgccggtgatcggcgaatggctggcgctgcctttggcggcggcggcaggctccactcaggttggcgatgcggtgagcgaggcgtttctttacccggtggcccatcggctgattgcgcagtgtcaggcggtgtatcgcatcgaaggggcatctgcgggagccgataacgacgtgcggttggctaacgaatggggattgacggtctatcgtcatctggaggaaattccgtctgttcaggcgtaaccgaggggcgggcagaggctcgccccctcgcgttattgctcgcccagcaccatcctcaacccggcgatcagcttgtccattccggcctccagcttgccgcgcgggcagccgacgttgagacgcaggaacccgcggccttcctcgccgtaggtaaagcccggcatgatcgccaccttttcgcgctcgatcagcgcctgctgcagcgcccgatcgtctacggacagcggccgcagatcgatccaggccaggtaggtggcctgcggcgggcgccagcccagcgcgggaaacgcctgctccagccgttcggcgacgtagctcagattatcctgcagatagtcgcgcagggcgtccagccagggttcgccgtggcgataggcagccacgtgcgccgccaccgccagcaccgccggcgaggagaggccgtcgcgggatttgagctgctggaagtaggcttcgcggctggcgtcatcgctgataaagccgtaggcgccggtcagcgccgggatattgaaactcttggagccggaggtcagcaaggcccaggcgccggtcgccacctggctccacggcgtatggcggtgttccccccatgccatatccatgtggatttcgtcgctgatgacgcgcacgtcgtggcgctcgcacagttcggccatctgctgcaactcgtcgcggcgccacactttgccggtgggattatgcgggctgcacagcagcaggatcttggtttgcggccgcgccagcaacgcctcaaggtgcgccatgtcgcagcgccagtcgtcgccggctttgtgcagcgggcaggccaacagctggcgttggttggcgaggatcaccttgtagaaggcgtcgtaggccggggtatgggtcaccacataatcgcccggtacggaccattggcggatcagctgcgccgccatgtagataacggaagggccgtacaccgccgttgcggtgtcgatggcgacgttgaaacgttgctgataccagtggcgcagcgcgccgagaaaatcctcgtgctgccagcggctgtagcccagcacgccgtgctgcaggcgttgctgcaacgcctcgagaatgcacggtgcggtggcgaaatccatatcggagatggtgaacggcagcaggtcgtcgctgccgaaacgatcggcgatatagtcccactgggtgcaccaggtgccgtggcggtcgatcggggtggagaaatcaaacatgggtggctccctgcagcgccgcggcaggttgcgccgtggctatcagtgagtctaattcatctttcaccgattgcacctgcgggccgatcaccacctgcagattatggtcgttgagatgcactacgccgatagcgcggttggccttcagcgccgcgtcgtccacccggctcatgtcgttgaccgacaggcgcaggcgggtgatgcagttgtccagcgtgataacgttgcccgggccgccgagggccgccagaatcgccggcacgttgtagccggatttgcccaccgcgccgctcggcgcgctttggctgacggcgctgtcgctctcacggcccggcgttttgatgttaaagcgctggatggcgaagcggaaaatggcgtaatagccgacgaaccagacggcggccaccaccggcaccagataccacttggtggcggtgccgtgcagaatgccgaacaccacgaagtcgatgatgttgccgtcggtgttgccgatggtcacgcccagcagcgccatcacggtaaagcccaacccggtgagcagcgcgtggatcagatacaggaacggcgcgacgaacaggaacaaaaattcgatcggttcggtggtgccgccgaccacgcaggccaccacgccggaaatcaacagccctttgattttgtgacgattctccggtttagcgcagtggtacatcgccagcgccgcgcccggcaggccgccgaggaacgccggcattttaccctgtgacaggaagcgggtggcgctctcggcgaagccggtggtggtcgggcaggagagctgcgcctggaagatggtcagggcgccgctgacgctgtggccgcacacctccatcgtaccgcccgcctcggtaaaacggatcagcgccaccagaatgtgctgcaggccgaacggcagcagcaagcgttcgccggtgccgaacagcatcgggccaaaggcgccggcgctgttgatcacccagcccagcccggtgatgccggcggcgaaccacggccagatcagtgggatcaccaggccgcacaggcccagcaccacggtggtgacgattggcacgaagcgcgtgccgccgaaaaacgccagcgcgtccggcaggcggatggtgtggaagcgttcatgcaggcgatagacgatgatgccgacgatcaccgcgccgaggatgccggtatcgatcgactgaatgccgagaatgttctggatattgttggctttcagcaccagcggatcgctggtgggcagcacgccggcggcggtcaggtagaagttggtgcccagattcagcacagcgaagccgacgaaaccggagaacgcggcgacgcctttgttttcgcgcgccatgcccagcggaatggcgatggcgaacatcaccggcaggaagctgaaggcgaaggagcctaccttgctcatccaggtgaagatcagctggaagatcgggtggccgataaacggcatcagggtgatcacgtcgcggctgctcagcgagctgccgatccccagcatgatgccgcagaaagagagcaaggcgacgggcaacatgaacgttttgcccaggctctggaagaactcccagagggtgattttgggtttgttggctgctgacataaccgacttctcctggcgaaaagacgagcaaaaaggggactgctgattaggtaaaaagaagataaaacgttttacctagcaaaaatgcgccaccaatcacaaatctgccgcccggtttttggcgacaatgcggctggcagtaaaacgttttactgagttaacggattcggtatacccttgatcattacggcgcgggttgcccaggaacgggttcgcagagactatgagcatcaaaaaaatcaccatcaccgatgtggcgcagcaggcgggcgtgtcggtcaccacggtttccctggtgttgagcggtaaggggcggatttcgccgaccaccgtcgagaaggtcaatcaggcgatagagcagctgggctacgtgcgcaatcgtcaggcggcgacgctgcgcggcggtgaatctggggtgatcggcctcgttctgcgcgacatttgcgaacccttctatgccgaaatgaccgccgggctgagcgaagcgctggaggcgcacgacaaactgctgtttttaacccagagcgggcgcgacggccagggcttgcagcgggcgtttgacgcgctgctggcgcagggcgtcgacggtatcgtgctggccggcggcattcgcgcggcggctgggttgaaggagaaggcggccgagcagggcgtaccgctggtctgcgtggcgcgctccagcggtctcgatggggtggacgtggtgcggccggacaacatgcaggccgccaaactggccaccgaatttttgatcaaacgcggccacagccaaatcgcctaccttggcggccagagcgactcattgacgcgtgccgagcggttgggcggcttttgcgccacgctggtgcagtacggcctgccgtttcgcagcgaatggatcgtcgagtgcgattgccggcagcgtgaggcggcgcaagcggcggaacagctgctgcgccactatccgaacattaccgctgtcgtttgccacaaggcttcggtggcgcttggcgcctattttggcctgacgcgcagcggccgcagcatcggctcggatggggttgacgcttactacgggcggcaggtggcgctgatcggcttcggcgacgtgccggaggccgagctgaccgagccgccgctgaccttcgtctccagctcggcgcgggaagtggggcgcagcgccgccgcgcgcctgctgcagcgcatcggtgacgccgacctgccggcgcagaacgtcattctgccgccgacgctgatccggcgcggctccgcctaatcccgccgcagttcctcttccgcctcccggcggatccagccgataaaggttttcatcgccggcgtcaggtcccgcgacttcaaatgggtcagccaataggcgccaagcgcggcctcggcggcgaacggccgctgcagcacgccggcggccagttcgcggcggaacatgctgatcggcgccagcgccacaccgtcgcactggatcgcgccttccaccatcagtcttgacgagtcgaacaccgggccgttgatccgccacggcgtcacctgcgcagccgtgaaccagcgctcccattcatccttgcggtaggtgcgcatcagctgctcgtgctgcagatcctgcggcgtgcgcaggcgcgcggcgaccgccggcgggcagagcaccgtcagcggcgcgtcgaacagcttgatattgcaggtggcgggccagaggccttcgccgaagcggatggcgaaatccatgccgtcggccgacagattgaccaggttgttgtgggtcagcacccgtagatcgataaacgggtgcgccgtgcggaacgccgccagcctcggcatcagccagccgacggcgaaggtgccgaccaccgccaccgtcagcacctcgtggaaatgcccgccttcgaactgttgcagcaccgcctcgatgcggtcgaaggcgtcgttcaacaccggcagcagcgcctggccttcttcggtcagatccaggccgcgcggcaggcggcggaacagctgaatgcccagctgttcttccagcatgcgcacctgctggctgacggcggcctgggtgacgcgcagctccaggccggcgcgggtgaagttcaggtggcgggcggaggattcgaacgcccgcagggcattgaggggaagtcgattgcgcatcgtcgatagccataagtttttctttatgctggctgaaattattatcgcttgtcaacccggcggcaaaatccgatatttggcgcggctgctgagagcgtcgcggcagccgtaaaggaatgacaccatcaaccagggaaagcgccgtgcataacgccaataaaaacttttggccgcggccgatgccctgcaacctgagagcttctatcatgacgaaaatgaaccgcctggcggccgcgttgatcaccgcgctgatcctgccgaccgcacaggccgcgcagcagcaggatatcgacgccgttattcagccgctgatgaaaaaatatggcgtgccgggcatggcgatcgccgtgtcggttgacggcaaacagcagatttacccgtatggcgtggcctcgaagcagaccggcaaaccgatcaccgagcagacgctgttcgaagtgggctcgctgagcaaaaccttcaccgcgacgctggcggtctatgcgcagcagcagggtaagctgtcgttcaacgatccggccagccgctatctgcccgagctgcgcggcagcgccttcgacggcgtcagcctgctgaatctggcgacgcatacctccggcctgccgctgttcgtgccggacgacgtgaccgacaacgcccaactgatggcctactaccgggcctggcagccgaaacacccggcgggcagctaccgcgtctattccaatctcggtatcggcatgctgggcatgatcgccgccaaaagcctcgaccagccgtttatccaggcgatggaacaggggatgttgccggcgttgggcatgagccacacctacgttcaggtgccggcggcgcagatggccaactatgcgcagggttacaacaaggacgataagccggtgcgggtcaatcccggcccgctggacgccgagtcttacggcatcaagtccaacgctcgcgatctgattcgctatctggacgccaacctgcagcaggtgaaggtcgcacagccgtggcgcgacgcgctggccgggacgcacgtcggctattataaggcgggcgcgttcacgcaggatctgatgtgggagaactacccgtatccggtgaaactgtcgcgtttgatcgagggcaacaacgccgggatgatcatgaatggcacgccggctaccgccatcacgccgccgcagccggaattgcgcgccggctggtataacaaaaccggctctaccggcggtttctccacctacgcggtgttcatcccggcgaagaatatcgccgtggtgatgctggccaacaaatggttcccgaacgacgatcgggtcgaggcgacttatcgcatcatccaggcgctggagaagcgctgacaatcaggggcgccggcggggcgcccctaccaccgatgctgccgttcacgttgctcgcgcatgaaatcgataaaggcgcgcagtttgagcggcagatgtctgccggcggggaagtagatgaaaaatcccgatgcttcgctggcgtaacccggcagcacttccaccagttgcccctgtgccagctcctgcaacaccgtgccctgaaaacgctgtgcgatacccagccccgccaatgccgcatccttgatcagcctgtcttcgttaaaaatcaaactgccgctgacgtccagcgcgcgttcatcgtcgcccaggctgaaataccagggttccagtttgccgctgccgggaaaacggtagcgcaggcaatggtgcgcgagcagatcgtccggcgtggccggcgcgccgcaacgcgccagatagtcaggcgaagcgaccagcacccggcgctggccgttatcgatcggcacggcgatcatgtccttttgcagcatggcgtgcatgcgaatgccggcatcgaaactgcccagcaccagatcggaaaagcggtcttcggtaaacagctccagctgcacctcgggatagcgccgctgaaacgccgccagatgcggcattaccagcagcgaagcggccagctgcggcagcgtaatgcgcagcaggcctgccggctgtgcgcccagggcgcgcacatcgtccgctgccacatcgatctggcccatggccggcgacaccttctgatagaacaaccggccttcgtcgctgaggcgcaccgagcggctggggcggggaaataaccgcactcccagctgattctccagcgcctgaatgttttgcgacaccgccggcggcgtgacgcccagttggctggccgcgcgggtaaagttgcccaggcgtgccacggcttcgaaatagggcagcagttgcaggagtgaactcatctatcaataacctgtgcttaatgattcattaagttatgccttattttaatttatgaagaacgttttagactggttttactttccctcagagagattaaaatcatgtcggcaatacaacaggcgttaacagaacggatcgcggcgatcgatcaacaggcgatggccgaagggcgcatcgtcggcagcgtggtgctggtggcgcggcggggcgaaatttgctacgccggggcggccggctatgccgatcgcgaagcgcggcaaccgatgcggcgggaaacgcagtttcggctgtcgtcggtttccaaaccctataccacgctggcggcgttgcgtttgattgagcaaggcaagctgagcctggacgatgcggtcagcgactggctgccgtggtttaccccggcactggcggacggccggcgcccgacgatcaagatccgtcatttgctgagccataccgccgggctggactatcggctgaaccaaccgccggcgggcgtttaccatcagttggggatccaggacggcgtggagctgtcgacgctgacgctggagcaaaacctgcggctgttggcgcaggcgccgttgctgtcggcgccgggggagcgcttcaattattcgctggcgatcgatgtgcttggcgcggtgctggagcgggtgacgggcatgtcgctgccgcaactgtttgtcgaatgggtggcgcagccgctggggcttggcaacaccgcattccatgcgacggacgccgcgaacctggcgacgccgtattacaacaccccgcaagggccactgcgcatgtatgaaggcctgcgggtggcgctgccggaggagatggcggggggcgaggtgctgttttcacccgcgcgggcgcttaatgcggaggcttatccctccggcggcgcgggcatggtcggcgatgccgacgacgtgctgaagctggtggaagcgctgcgcagcggcgggcagggcatgttgcagccggacacggtggcgttgctgcgcagtccgcacgtcggcgcgcaggcgcaaacgcaagggccgggctggggcttcggctttggcggcgcgctgctggtggatccagacgccgcgcagacgccgcagcacgccggcacgctgacctggggcggcgtttacggccacagctggttctttgatccacaggcgcagctgagcgtggtgatactgaccaacaccgcgtttgaaggcatgtgcggccgctacccgcagcagatccgcgatgcggtttatgcggcgtaaataaaaagggccccgcagggggcccttgttaggttttcaggctattactgcgccggtgccggagcgggttccgcttcctgagccggttcagcgtcttccgccggggcgcccagcatggcgaactggccgatgaactcttgcagcgacatcttgttgccgttcaggtcaacctgattgtcagcgtagtggaacttgctcgcgatcacgccgtctttctgggtggtcagcttgaacatctgacccatggccgccaggccctgcacttgctgctgcgccagtttctgcgcgtcttccgcattatagccctgcaacaaggcggtcttcgcggtcacttcggtagccatcgcttccggaatggtcaggctgagatccagctttttaaccgcctgcgcgatcaactgatccggcgattgtgccggggaggcggccttgctcggatcggtcatcgccagatccagcgtgaagacgctctcacccttgctgtttttccagctcagcggggcgatgctgaggctcgggttgcctttcagcagcagcggcaggttcttttgcagcatctcggaggtctgctgttcgtagacgtccggatccaggttctcgccctgctgcagcagcgccatggtttggcggttgtagctgtcggagaagtctttcagcgccttgccgtcgacgttgtcgattttcagcgtcagtttaccggcaccgaagtcgttgccctgcaccttgagcgcgtccatggtgtagtcgatctggccaccgatattgctgctgccttgctcgccaaacttgctcaccagattgaaaccgtccaacgccacggtatctttaccgtcgatcgtcagtttgaactgcttcagcgtcatcgtctgatcgccgagcttcacgccgaacttgctttcgttgctgttgcctttcaggttgaagccctggaaggtgatctgctcgttttggccgaattcgttcgggctggcgaacacgatagtgtcgctattggcgtccagcgcgaattttttcagatcgcgggacacatcggcgtcaatggtggcgccgctgaatttcagcgaagatttatccttctggtagtccagtgggataaagtcgatggtggacgcggtatcgccgctgtacgagatgcgcgaatcggcggtaaacagcgatttgcctttggtggtttcaaacaggcctttcaccgccggggtgttttccagctcggtatgcaccgacgccatgctcggcagcaggttgaattttttcagctgcgcgaacgggaacggaccgtgatcgatggtttccaggaacgccacttcttcaccggctttcagcgccgcattttcactggtatccgtgccgtcggaacgcagcacataacgcactttactgctgaacaggccgcgctggtaattttcatagctcagcttgacgccggctttcggcaggtaggctttcagttggccgttggcgttgtcgacgacttcgcccatgtgctgctcgatctgtttcccggtgtaccaggatgccccggtccatgctgcgccaagaacgacaatgacgctgacagcgactaacgattttttcatagctctgtttcatcctttttttcttatcaccctccgttgcatgggaggggcaaataggggccgacaaaaaacgcccgcaggcgtttaattgtgggggtagctctcgctttcagcaagcaatttgctgaaatttatcaacggttaggccagctggttataaacccgggcgatgcggccgctgccgctgacgttgaccggggattcgaacgccccgataaagcaggactcgcccggtttgagcgtcaggcgttgcccggatttctccagcgtcgcttcgccggcgacgcagaacacgatggcggcgcttcgctgtgccagcgcctgtggtgcggcggtcaaatcgtgcagtgagaaggcgaaatcctccaccgggatcgggaagaacagctcgttgccgcgttgctccggttgggtcagcaggccggaagccggttgcgggcggaactgcaggttggccagcagctcgggcacgtcgatgaatttcggcgtcaggcccgcgcgcagcacgttatccgagttggccatcacctccagcgccacgcctttcaggtaggcgtgcggcgtttcggcatacaggaacatcgcctcgcccggcgcgagctgcaccacgttcagcagcagcggtgagaacagaccgctgtcgtccggatagaagccggcgataaagcgcacggtatcccagggttccccctgctggttgttgagcgcggctttcagcacgccgagcgccagcgatttttgttcgccactcatcgtcaacaggctggcgaacagggtcgcgaggtgcgcggtgtccggctgttgcaggaaggcggcgatgtcgtggtgcgcgcccgcgatcggttgcagcagggaaacgatatcggccagttcgcgaaagccgttcatcgccaggaacggcgtcagggcgaacaccagctcgggcttgtggttgggatctttatagttgcgttcggcggcgctcagcgggatgccggcggcattctctttcgcgaagccgatctcggccgccgctttactcgggtgaacctggatcgacagcggctgatcggcgcacagcactttaaacaggaacggcaactcgccaaaacggctggcgacgtcggcgcccagctgttttggctggtcttcatcgataagaaagcgcagcgaacgcagttcgccgtcggcgcccggcacgcgggaagggctcttgggatgggcgcccatccacagttcggccatcggctgattatccgggttggcgatgccgtaaagacgggtcagcgcatcgtggctgccccaggcgtaattctgtaccgcgttggtcattttttgcatgtcgataaacgtccttaacgtcattgtcgcactggatgacaataacctactgattttatacggttaactaaatctgtgccgacgactatcctacgcccgcgtcggcaggaaaaatcatgggcgcgatcaaaaaaacgccggataacgtcgcgcccggcaatggggccatagtataacgtgataacgatcggcgtctcaattggcgcgcaggtcccaaggcgacccggaaaacccgccgatcgattattatttggcccaacggggattattgcctttagcctggtcattcaacgtcattatttattttttcagcatgtcaaactatgtcggctgaatttattttttaccgtctgagccattcccttattattattctcgcgctgcaccgggctatcacacgctgagcttaaacctgggcgtcagacccctttaccgtaacggctaacacgtcgatttaacgaaacaagaggtctgttgcatgaaaacactgttgttgctgttggggttttgcaccggcgcagcccaggcggcggtgattgtcgcctatccctacgcggcgccgcgcgccgtggtgatcgcgccggcgccgatcgtcgtcacacccgccccggtcgcggttcccgccgcgatagcgcctgtggcgcatccgctggcactcaccgccggtgcggcggtgaccggggcgtatcggcatcatgaacggcaggacgcctacgacgagatcaatcatctgcagcagcaacggatcgatgaactcaatcatttacaggcgcagcgcatcaataattttaatgcgcgtcatccgcgttaatggttatccagatttttattctccaggctcattcccggccgtttatttcaccgcgggttaaccggcggaaaataaccgcgtcgttaatgggtaaaagagatgaaacgtgctgtgagataactctcttaatgcgaatagttattatgtcactatactgggagtgcatgccgacgtgggggggagcgcgtcggcctaaccctacaattttaggaattatgctaaggagatcgtgatggcaggcgttcgtatcgaaaaagactctatgggccccatcgaagtaccggccgacaagctgtggggcgcgcaaacccagcgttcgttggcgcatttccgtatttcctccgaaaagatgccgaccgcgctgatccacgcgctggcgttgaccaagcgcgccgccgcgcaggtgaacgtggatctggggctgctgccggccgaacggggcgccgccatcatcaacgccgccgacgaagtgctggcggacagccatgccgaccagttcccgttatcaatctggcaaaccggctccggcacccagaccaacatgaacatgaacgaagtgttggccaaccgcgccagcgagctgctgggcggcgtgcgcggtgaagagcgcaaggtgcacccgaacgacgacgtcaataaaagccagagctccaacgatgtgtttcccaccgcgatgcacgtggcggcggtgattgcgctgcgcgaacacctgatccccgagctgaaagtgctgcacaagacgctgagcgacaaggccgaagcctaccgcgatatcgtcaaaatcggccgcacccatctgcaggacgccacgccgctgaccctggggcaagagatatccggttgggcggcgatgctggcgcacaatctgaaacacatcgaggacagtatcccgcacattgccgagctggcgctgggcggcacggcggtcggcaccggcctgaatacccatccggagtacgcggtgcgcgtcgctaaagcgctggcggagttgacccatcagccgttcgtcaccgcgccgaacaagttcgaagcgctggcgacctgcgatgcgctggtgcaagggcatggcgcgctgaaagggctggcggcttcgctgatgaagatcgccaacgacgtgcgttggttggcgtccggcccgcgctgcggcattggtgagatttcgatcccggagaacgagccgggcagctccattatgccgggcaaggtcaacccgacccagtgcgaagcgatgaccatgctgtgcgctcaggtgctgggtaacgacgtggcggtgaacattggcggcgcttccggcaacttcgagttgaacgtgttccgcccgatggtgatccacaactacctgcagtcgattcgcctgctggccgacggcatgcagggctttaacgagcactgcgcggtgggcatcgaaccgaaccgcgatcgcatctcccaattgctgaacgaatcgctgatgctggtgacggcgctcaatacccatatcggttatgacaaggcggcggaaatcgccaagaaagcgcacaaggaagggctgacgctgaaagccgcggcgctgaagctcggctacctgaccgaagcgcagttcgacgagtgggtgcggccggaagcgatggtcggcagcatgcagaaataatgacgtcatgcctaaatggggcgcggttgcgccccgtcttttcaagccaacatctctagcaccgataacagcgcctgcggctccggccgctgggtgtaatcggcgtgcgcttcggcgtagacaatacggccatcgcgggcgatgacgaatcgcgccggcagcggcagcgtccagctgtcatcctggttgaactgcgccagatcgaggccgagccgctgttgatacagggcgatcagcgcgtccggcaggcggtaacgcaggccgaactgggccgccagacggttgcctgtatcgctgagcaacggaaaagtgagatcgtgaccgcgcgcggcctggcggttatgcaccgcgctctgcggcgaaacggccaacaactgcgcgccgtactgcgtgatggcgggcaatgcggcctgcagcgcctgcagatcgagcgtacagtaagggcaccagatcccgcgatagaaactgacgaccagcggcccttttgccaacagcgccgtggaagagcatggtcggttttcgctgtccgacagtgtaaagccgggcgcggcgtcgccgaccttcagggcgcgttcggccacgcccgacgcgatctgcgcctggatcgcctcacgcatcagcgcgtgatcttgcaccgcgagtttgaacggcagttggtcggcctcgaatgccgctttgaaggcatcgagtttgtcttgcagtgtcatgcgttctcctgacgggaatgagggggagcgcttatcttgcccattccaaaatggcgcgtgtagactgcaacaaatgctaacagttattccaacaaggaatgccatgggtaaatttgccgattacgaaacctatgcctgcgtttacgagagcggctcctttaccgcggcggcgcggcggctgcacgtggggcagccggcggtctcaaaagcggtggcgcggctggaacagcagctcggcacgcgcctgatgctgcgctcgacccacggcctgcagccgacggatgcgggacagcagctgtatcaacgcacccggcgtatcctgaacgagctggcggagacggaagcgctggtgcagagcgccggcgagaccctgagcggccggttgcgggtcgcttcggcggcggtgttcgcccgcatcgttcccttgcctgatttgacggcgtttatgcgcgccaatccacggttgcacgttgatttgctgctggatgacggcaatctgtcgctgattgaagaaggcatcgatattgccctgtgtgttggcgagttggaggattccggttttaccgcccgcaagctgggtgaggtaaagcaatgcgtgatcggcacgcccggctattttgccgctgccggtatgccgcagcggccggaagatctgttgcagcacgagatggtgatttaccatcgccgtggcggcggcgagcagtggcgcttcagccgcggagaagagcagcgcgcgctgcggttgccggggcgcatgcgggttaacgcggcggagtgcgtgcgcgagttggtgctggcgggctttggcgccaccgtcgccagcgaaggcctgtttcgcagcgagctgcaaagcggggcggcgattgcggctttagcggactggcaactgccgccgctggcgctgtgggcggtgttccccggtggccatttcgtctcggccaaggcgcgggcctttgccgattttgtccaaaccgcgctatgcagggagccgtgatatgtcgcgcgcacaacgtttactcgatctgatgcagctgctgcgcaaccaccgttatccggtggcgggccatgcgctggcgcagacgctgggcatcagcatgcgcaccctgtaccgcgatatcgccacgctgcagcagcagggggcggaaatcgccggtgaggcgggcgtcggctatgtgctgcgccccggctttatgctgccgccgctgatgttctcgccggcggagacagaagcgctggtgctggggatgcgctgggtcagccgccgcggtgacagccaactggcgagcgcggcgggtcaggcgctggccaagatcgccgcggtgctgccgccggcgctgcgggaggagctggaggccaatacgctgcttatcgcgccggttcaggcgccgccggtggcggatgagatgcgggtgctgatccgagacaccatccgctgcgagcgcaaactgcatatcgactacctcgatctggcggggcagcgcagcgaacgcctgctgtggccctttgcgctgggttttttcgatcagtttcagatgttggtcgcctggtgcgagctgcgtcaggcctttcgccattttcgtctcgatcgcattcaggccgccacgccgcttgcacagcgctatccgcgtggccggcggcggctgctgaaagagtggcgcctcagcgagggcattgcggagcaatagcggcacgctgctgccataaactgtcagtcgcgcgccttagtctgtgcctatcgggaaccggccggttcccatcacccaaaggacagaccgatgacccttcccagcatgaccctgctttacgtcgacaacccgctcaacagcgccgccttttatcaacgcctgctggggcaggcgccggtggagctttcgcccggctttgccctgttcgtgctcaacaacggcttcaagctggggatgtgggccaaacagggggtaaaacccgccgccacgctgaccgggggcggcggtgaactgggctttttatgccaggatccgcaagaagtggaggcgcgctataaccagtggcgcgaacttgggctgactatcgagcaaacgccgaccgagatggagttcggttacaccttcgtggcgcgagatccggacggccatcgcctgcgggtgtatgccctcagcgagtagcgtcgtcggtatacaggtgcagacgcggcaccagcagccgcagcggcctggcgtcgggtttgtaacggtgtttcaccgcctcggcgtcgtagttgagcagttcgccgatcttcggcaccgcggcgccgctttcaacctgacacagggcgatcagcggtagcgggcaggggtgctgcacctgtttttgctgctgctgataccacacccgggcgatcggctgcacttttaccggccgtttgatcttcagcgtcgcctgctgcggcagccggctgacgtcgtcgatttcacggctgaccagtgcggcccactgttcacggctgtgcggcggcaccgcgcggccggctttcaggcttttctccagctgcgccagaatgtcgtcccgcttgacgtttttgatgatgtgcttgttggcccagccgaagcgcacggagtcgggattggtcagggcggtgagggtgcgataggcgctgagggtaatcagcccgtgcagatgggtgtgcacgaactcgaaacgctgctccggcgccaggccggaatcgacggtgataatctgctccagttcgcccttcaggcggttgatcagcgccagctgcgtttgcagcgcctgatactccggttgctccaccgccagacagatgacgccgggcaggcgcacggcggccttgctgctgacattctcccggttgtggtgaatgaacagccgctgataatgctccagcgccagatcgcgcgccgcttgccccacatgctgctcgaccgcgatatgcgaaatggcctgatgttcctggcctttttcaacctccggcaggctgaacacccgcgccgccagcaaccgcagcggggcgatctgctgctgcaacgcgccgagcgcctgctccagctcgttaaagcaggcgttcattcggccaatcacatcgtatctgctcatcgcacacccccatattagttacaacatactatagaagagtggccgactgggggcaacataggcaaacgaagagggagcggcttcactggccacccggcttgtcagcgaaaaatacgccagagggacttctacagcagggcgcgaaatagactttgcattggtatgggtttgattcattgatggattttttctgttggttgatattttgtttgatccattttccgtttgccgttgtccaattgctggaacaaacagaatggcaggacgctatgagcccctcgggttatcttttcttctgtcattaacgggtgctttaaacggaggtttactgtggatattaaacagaaagtcaaaaacatgacgctggaagagaagatcgggcaaaaaatcatgctggattttcgctactgggatcagaacggtagcggcaatcaggatatgaccgttcccgatgcagccattggcaagctgatcaccgataaccacatcggtggggtgatcctgtttgccaataatctgaaagacaagcagcagatcaaaacgttgacggcctggtatgccgcgctgaaaacccacgcgggcgttcgtttgtttattggcacggataacgaaggcggtaacgttttccggctgccgcgtggcgactacgcctcattccccggcaatatggcgctggcggcggcgatcgagggcggtgcggataaacagctcgccgttgaacagggcaaactgatggcccaggatatgcgcgcgttgcatatcaataccaactttgccccggtcgtggacgtcaacaccaacccgttcaacccggtgattaacgttcgcgccttcagcgatgataagaacaccgttgcccgcctggcggaaaacatggtggcgggcatgaaacagcaggggctgatcaccgcgtacaaacacttccccggccatggcagcacctccaccgactcgcataccggtttgccgcgcgtcgatcgtacgcgggaagaagcttttgccattgatatcgccccttataaacaggccatcgatcgctgcgcggcgccggatatggtgatgactgcgcatattcagtaccccgcactggataacagccagatcgacacccgcaacggtgaaaaaatcacggtgccggccaccatgtcgcgcgaaatccagacccagatcctgcgcaatgagctgggttatgccggcgtaacgatttcagacgcgctggatatgggcgcgattgccgagcatttcagccagcaagcggcggctgaaaacgtctttaccgccggagtggatatcgccctgatgcctgtcagcatcgcctcgccggcgcaggcgagcctgctgcccgagcttatccgctacattgcgcagcgggtgaaaaccgggcatctcagcgaggccgatatcgatgcttcggtcgagcgcattttgcgcctcaaattgcgccatcacctgatgggccatagcgataaaccctgttcccacgacgtttcgtcctccgcgcatcagctagagaaacggattgccgatcgttccattaccgtggttatcaaccgtcaatgtctgctgccgttaaaggacaaagcgctgcgctactttattctgactccgtggggcgagcaggccaaaggcattgcgaacgtgatggcgcaggagggctatcagaacgtcgtggccgcgaaggaaacggaactgagcgacgcccaggtcagggaacatattgccggctgcgacgtgttcttgcttggaaccctctcaacccgctttacgcctgccgagcaggatggggtcgtgaccgccgcaaccggggcggctaatgacagcagtccttatccgggctggctgaaatacgccgccgagcaggggaaaaaatgcgttcacctctcattgcgcgcgccttacgatatcgtgaactatgccgctgacgtggatgcggctgtcgccacctattcttactacgggtatgacagcggcgtatggcgtggcccttcgatgatatcgctggcacaggtgctgacggggaaaatcagaccgcacggaaaactgccggttaatacctggcatgactacgatgagcaaaccaataccggcaaggtggcgttccctcgcgggacggggctgagctggtgatgggataaggagaggcgtcgccagaaagggcggcgccggtcgctggatggcgttgataaagcgggcggtttcttgctccgcacgccgcgacatgggataaccgtcactcacggaaggagaacatttatgccgacaggcgcaacaaaactaggcggatggctgttgatggccgccatgctgggcgtgagcggatgcgccaaaccccctgagccggaaaagcctccgcagcctgtaccgccggcaacgccgatgcggggcatctggctggccacggtcattggcttggactggccgccggcggcctcgctgaaagcggaatccacgcaagagcgggtgcgtctgcagaagcaggggctgacggacgcgctggacgacatggtgaaaaccgggattaacacggtgtattttcaggttaaaccggacggcacggccctgtggcgttctgacatcttgccctggtcggaggtattgaccggcaccgtgggccaggaccccggttatgatccgctggcctttatgctgacagaagcgcaccgacgcggcatcaaagtgcatgcctggctgaacccttatcgggtttccatgaatacccgacagcaaacgattgatgcactcaatcatacgctgcagtcgccgccggccagcgtctatgcgctacatcccgactggatacgcaccgccagcgatcgcttcgtgctcgaccccggcctgcccgaggtgcgcaactggatcaccggcgtggtggctgaagtcgtcaaaaactacgatgtcgacggcattcagtttgacgattatttctattacgaaacgccgcaatcgccgctggatgatgaaaagacgtatcgcgcatacggcaaagggtttgcagacaaggccgactggcgaagagacaacacgctgcaattgataaaacaggtttccgccaccgtcaaagcactgaagcccgcggtcgcgtttggcgtcagcccggcgggcgtatggcgaaacaaagcggacgatcctgccggttcggcgacgcgggccggcgcgccgtcgtacgatacggcctatgccgatacgcgccagtgggtcaaactggggctgctcgactatatcgcaccgcagctgtattggcctttcgatcgtgaaattgttcgctacgacgtgctggccaactggtgggccgaggtggtgaaagacacgccggttcggctctatgccggggtggcgctgtataaagtgggcacgccatcggccagcgagccggcctggaccgtcgacggcggcgtccccgagctgaaaaggcagttggatctcaacgagagcctgccggggatggggggaaccatcctgttccggcaacgttatctgaccgagccgcaaacggacaaggcggtggagtacctgcaaactcgctggaaacccggtcaataatcacgggctctggcatgacgagccgcggctaaccaccgcggctttttccattcacaggcgcgccgcttccggcagccgtttcaggtaatgcaccaccagcagcgccagcaatagcatcaggctgataaacgccgccacgccattccagccgaagctgtgccagaacacgccgcccagggtgccggccacgctggagccgacgtaatagcagaacagatacagcgacgacgcctggcctttggcgcggcgcgcacggcggccgatccagctgctggccaccgagtgggcggcgaagaaaccggcggtgaacagcatcatgccgataaagatcgccggcacctgcggcagcgcggtaatcaggatcccgatcagcataatcacgatcgacgccagcagcaccgggccgcgcccgaagcgcgaggtgagcgcgccggccttgggcgaactgtaggagccggtgaggtacaccaccgacagcaggccgacgatcgcctggctcaggtgataaggatccgccagcaggcgataaccgatgtagttgaacagggtgacgaagctgcccatcagcaggaaaccttccgcgaacagcagcggcaatcctttatcgtgccaatgcagtttgaagttgatcagcagggtgcgcgggcgcagcgagctggcgcggaaatgccgcgaggcgggcaggatgcgccagaacatgcaggcggcggcgagggcgaacaggccgatgacgccaagcgatacgcgccaggagaagaagtcggtcagcaccccggtcaccaggcggccgctcatgccgccgatcgagttgccgctgatatacagccccatcgagaaggcgacgaagctggggtggatctcttcgctgaggtaggtcatgccgaccgcggcgacgccgctcagcgacaggccgatcaatgcgcgcatcagtaaaatgccgtgccagctggtcataaaggcgcaaatcaacgtgcaaaccgccgccagcagcagcgccaccaccatcaccgacttgcggccgatggcgtcggacagcggcccggtaaacatcaggccgatcgccagcaggccggtggagaccgagagcgacaggctgctttccgccggcgagacgccgaagtcttgcgacagcaccggcaggatcggctgcacgcagtaaagcaacgcgaaggtcgccagcccggcggaaaacagcgccagcgtgacgcgcataaactgcggcgtgccgcgttcgatataggggagtttattgttgagggtggagcgttttactgttggcgcagcggccgcgtcatcgttggcggccagcgtcgacggcatcacggccgcagaacgcacaggggttgtcacagcgtttccttaccgaacttcggggagataaacagacactttgcagataacaaaatgatagggagcggcgaattttttgtctaatatattaataattacaattaagactttttaaatatgaatatcgagttgagacacctgcgttactttatcgccgtggccgaagagctgcattttggccgcgccgccgagcggttgcgcatctcccagccgccgctcagccagcaaattcaggcgctggaagagatggtcggcgcgcggctgctggcgcgcaacaaccgcaacgtcagtttgacccaggccggggagatgttcctcaaagaagcctatcaggtgctcgatcaggtcggccgcgcggcggaaaaggcggcgcgcctggatcgcggcgaactgggggaaatgaccatcggctttacctcttccgcgccctttatcggcgtggtggcgcgcagcctgcgcgcctttcggcagcagtccccgcaggtgcacatcaagatgcgcgaaatcaacaccaaacagcagatcgaaccgctgctgaacggcgaactggatctgggggtgatgcgcaacacgcggctgccggaagcgctgcactatcagctgctgctgcgcgaaccgctggtggcggtagtgccggaagggcatccgctggcggaaacgcccggcggcgcgctgcggtttcaacatttggcgcgggagccgttcgttttcttctcgcgcgaagtgggcaccgcgctgtacgacgaaattctgctgctgctcggcaaggccggcatcaccccgtatatcacccaggaagtgggggaagcgatgactatcatcgggctggtctccgccgggttgggagtttcgattctgccggcgtctttcgcccgggtgcgggtggacggcgtgcgctatttgccgctggcggagccggacgccaccaccgaagtgtggctggtgcaccaccgccggcggccgttgaccgcggcggcgcagtcgctgatggcgttgatgctgaaatgacgttgagcttgggcaaataaaaatcaattcacgctgaaattgcgaggaatttgtgcagcaaatcacataacgaatcaaatagttgacgctgtatgacaaaagccccaccataacccctagtctttatttagaagcgcgaaaaatagtaggagccggtttgtgattgcggttgggcagcctgggcatatcgatcaaatcaaacagaccaatgcgggggcggtttatcggctcatcgatcaactgggtccgatttcgcgcatcgaactgtcaaaacgcgcgcagctggcgcccgccagcatcaccaagatcgtgcgcgagctgctggaagcccatctggtcaaggaaaccgagtaccaggagatcggcagccggggccgcccggcggtagggctggtgctggacaccgaagcctggcactacctgtccgcccgcatcagccgcggcagcatcacgctggcgctgcgcgatctcagcagcaagctggtggtggaggaacagctgccgctggcggccgaacatcccgaaccgctgctgaagcgcatcctgaccgaagtcgatcagttctttatccgccaccaaagcaagctggaacggttaacggcgatcgccatcacgctgccgggcatgatcgatgtccagtccggcgtggtgcaccgcatgccgttttacgacgtgctggagatgccgctcggcccggcgctggaaacccgcaccggcctgccggtttacctgcagcacgacatcagcgcctggaccatggccgaggcgctgtacggcgcctcgcgcggcagccagaacgtgattcaggtggtgatcgaccacaacgtcggcgccggggtgatcaccggcggccatgtgttgcacgccggcagccacagcgtggtggagatcggccacacccaggtcgatccctacggcaaacgctgttactgcggcaaccacggctgtctcgaaaccgtggccagcattgagaacatgctggagatcgcccagcagcggctgagcggctcgatgagctccagcctgcacggcgcgccgctgaccgtcgaatcgctgtgcgacgccgcgctggcgggcgatcagctggcgcgggacatcattctcggcgtcggccacagcgtggggcgcattctggctatcatggtcaacctgttcaatcccgagaagatcctggtgggctcgccgctcaaccgcgcggcggagatcctgcacccggccatcgcctcctgcattcgccagcaggcgctgccggcctacagcgagcaggtcaaggtcgaatccacgcagttcttcaatcagggcaccatgcccggcgcggcgctggtgaaagaggcgctgtataacggttcattgctggtgcagctgctgcaaggctaacatcagaacctcttattaattccgcaaaagattgagctacctcaagcccctacgcggcagcatcccctagaatttttccgaaagacttcttcgccgccggtgcggcgatacattgttaacggggcattctggggcattttattcatgttgaagcgtttatttgtgacaggcacggataccgacgtcggtaaaaccgtggtttcccgcgggttgatgcaggcgctggccgccgaaggccgttcggtggccggctacaagccgatcgccgcacgctgccaggaaaccagcgagggcatccgcaataaagacgctttggtattgcaggcatcttcaaccctgccgctgtcctacgaggagatcaatcccatcacctgcctggatgaggtgtttcatgcgcatgcgaccgaggacatcaactatggcgtgatgagcagcggtctgcgggatctgtcggccaaagccgatacggtggtggtggaaggcagcggcggttggcgggtgctgatgaacgatctgcggccttacgccgagtgggtggtgcaggaacagctgccggtggtgctggtggtgggcatcaagctgggctgcgtcagccacgcgttgctgaccgcacagtcgattatcaacgacggcctgccgttgctgggctgggtcgccaaccgcatcaacccggggttggcgcactatgccgaaaccatcgcggcgctgcagcagcgcatttctgcgccgctgctgggtgaaattccgtacctgccgcgcgcggagcagcgcgaactggcgcactacctcgacatctccacgctgctgcgctagcgcgctcaggccaggaaaggggccaacaaacgggcggagacaaacagccccaggccgtacaccgtatgcaccagcaggctgatgatgcggctacgcgtcggattgggggtgttcgccgccgccacgccaaagcccaacgccggctgcatcacgaagaagggcgccgccaggctcagccagccgctcaacagcgcgaccagcggcgtcggcgcggcgtaccacgcgatgcccgccaagccgagcgggataaaggcgaaggcgacgccgatcgcgtagtgcagcagccatcccatcgctttttctccccgccgcaccggcgcagccatgatcggagcgtgataaaaccggccgtcgaacaggccgataaaccagcggccgaccagcgcgtagttaaggggcgggatgcccagcacgcgcttttgcacgatggcccacagatcggtgcacagcgtggcgcccaccccggtaagcagaatcatcagtaaaatttctgtcgtcattttcgtgtccttaaagtcactcatggtgtaatgtgcgcacagtgtgcaacttaaagtcgacttcaagtcaatggaaaaagaactggatattggcgaggtggcgcgtttgagcggcatcgcgccctcggcgctgcggcattacgagaaaaaggggctgatcgcctcgataggccgcaacggtttacgtcgccaatacgccgccggcgtgctggatcaactgaagctgatcgcccttgggcggctggcgggatttacgctggatgagatcgcctcgctgtttgacgatcgagggcgcatcgccctcgatcgccggctgctggcggcgcggattgaagaactggatcgcaccctgcggcgtctggggcaggtgcgcgccggtttgcagcacatggtcgattgccctgaaccggagcacctgcagtgcccgcagttcaggaagctgctgcagcagggcgagttttaagcctcgcgtttgggcggcggcgcggtgtggtagaccgataccggccgcaggccgcgcgacacggtggtggcgatcacgcaggccagcagaatgccgggcagcagcgcgtattcgccggtcatttcaaacaccatcagcgccgccatgatcggcgcatgggtggtggcggccagcagggtagccatgccggtcagcgccagcagcagcggcaccgccgcatccatccccggccacaggccgaacagctggccgatcatcgaaccgagcgcggcgccgacgaacagcgtcggggtgaagaccccgccgggcgcgcccgacccgctgctggcgaggatcgccaacagcttgcataccaggatcgcccccagcagcaacacccccggcggcgcgatcagcagcgcctgcaccacgctgtagccattgccccatacctgcgggaacaacagcgaaagcagcccaacgatcaggccgcccagcgccagctgcagcggcggcttcaggcgaagcgatcggaacgcgcggccggtggcggtcatcaaccataaaaacagcggcccgccggcgccggccaccacgccgaccagcgccatcagcaggtattgcgtcggcaagggggcggcgagcggcgtcaccaggtagagcggcgcctggccgccgttgagcaggttggtcatcagcagggcgctgaccgcggcgatcaccaccgggccgagcgaggccagcatcagggtgccgaacaggatctcggcgataaacaggctgcccgccagcggcgcatgataggcgctggccatcccggcggcggcggcgcaggccacccacagtttccattctttctcgtgcgtaaagcgctgggcaaacagcgagcccaccagcgctgccagcaggatcatcgcgccttcacggccgatggcgctgccgctcgacaccaccagcagcgacgccagacacttcaccaggctggcgctggtgtccagcttgccgttgccggtctcgatcgcttccatatagtcggtgggcgccgccgggcgctggtggcggtagcgctggtgaacatacagcagcaggcccgccgccagcccgcccaacgcaggcgtcagggcgcgccgccagccgggcagcgcggcggcggcggccaccagactgccgtcggcattgccgagcaacagccactcgaggccaatcatcgaacggtggaacagccacaccgccagggcggcggcgacgccgatgaacacggcgataaacaggctgcgcagcagggcgcgatagtggtgcaggtggaccaatcttttcatgcgtgggcggcgtcgtgagaaaaatcaaagggtcatcagcgcattgtgcttggcgctccggccgatgaccagtgaatctttatcaaactgcggcatgggcggggcggtcggcgccccggcgggggttattgcggcgtcagcacccggcgcgtgcggccggagctaaggtagtcagcgatataatcctgcgagatttcgccgctgtagcggccgtcttcatcgacgatcggcatccaggacgtattgtgctcatacagcttcgacagcaccacgcgcaggttctcttccgcgcgggcggtgacgcgaaagtggtgcaggctgtcggcgcatacccccggcgcaccgcgcgcctcgcggcgtttgacgtaacccagcggtttgccgtcggcgtccactaccgtcaccgaacgggcgtcgatatcgtccatcaacccgaatgcctctgtcagcggcgtttcccggcgtaccgtcaccgtctcttgttggtctgccacgtcgccggcctgcaccagcagcaggcgcttcagcgtgcgatcctggccgacaaaggaggcgacgaagtcgttcgccgggcgcgccagcagctcatcggcgctggcgttctgcacgatcttgccctggcggaacaccgcgatgcgatcgccgagcttcagcgcttcgtcgatgtcgtggctgaccagcatcacggtcttcttcagctgacgctgcatgtcgagaaactcgttctggatggtttcgcggttgatcggatccaccgcgccgaagggttcatccatcagcagcaccggcggatcggccgccagcgcacggatcacgccgatgcgctgctgctgcccgccggacatctctttcgggtagcggtgcaaaaagcgcttgggatccagcgccaccatgctcatcagctcctcggcgcgatcgtggcagcgttttttgtcccagcccagcatgcgcggcaccacggtgatgttctcctcgatggtcatgttggggaacagaccgatctgctggatgacgtagccgattttgcggcgcaggctgacggtatccagcgcgctggtgtcttcgccgttgatcagaatggtgccgccggtgggttcgatcaggcggttgatcatcttcagcgtggtggttttgccgcagccggatgggccgagcagcacgcagatttcgccttccggcacgtccagattgatgttgtcgacggcgttgaacggcgtgccgttcttttgcatgaactgtttggtcagattttccaatttaatcatgagcggatccccttgggcgtgagcgcaatttgcaagcggtgcaataaccaatcgaggacgatcgccagcaggctgatcatcacggcgccggtaatcaactggcggatgtcgctgctgctgatgccgttgagcagcagcaggccgaggccgccggcgccgatcacggcggcgatcgccatcacgccgatattcatcaccacggcggtgcggatgccgccgaaaatcaccggcagcgctaccgggatctccacccagcgcaggcgttgccagaaggtcatgccaatgccgcggccggcttcgcgcagcccgccgggcaggttgtcgagcgcggtgtgggtattgcgcacgatcggcagcagcgagtagaggaacaccgcggtgatcgccggcacgtagccgatgccgtggccaatcaatgaaaacagcgggatcatcagcccgaacagggcgatggagggcacggtcagcaccagcgtggccaggctcagcaccggcgtcgccagccatttgtggcggacgatcagcacgccaagcggcacgccgatcaggatcgccagacccacggcgacgccgaccagcagcaggtgttccagcgtcaacccggcgatataggcccagttttgccaggcgtaaagtaaggtattcatcatgcctcctaaatcaggccgcgctgcttgaggaacgcgtcggcgacctgttgcggcgtctggtagtcgatatccactctggcgttaagctcggtgatcacctgattggtgaactgtttcgacagcgtgttcagcgccgcttccagccccggcgtgttttgcaacacgtcggcgcgcaccaccggcgtgactgcatagctcgggaaatagcctttgtcgtcttccagcacctgcagatcgaagcctttcacccggccatcggtggtgtataccagcccggcgtcgacgaagccgtcgcggatggcgttgtagaccaggccgggatccatctggcggatttgcgggcgatccagcggcatgtcgtacagcgcctgcatcggcttcaggccgtccgagcggccggcaaattccagatccagccccagcagccagttgtgtttcgggtcggttttacgcacctgttccactttggccaccagctgcgacatcgtgcggatctgctctttttccgcgcgccggcgctgcatggcgaaggcataggtgttgttcatgtccgccggctgcagccacaccaggccgagtttggcgtcgagctttttcaccgtgtcgtaggtttcctgcggcgacatgcgcttattgatgtggttaaagatgatcagcgaggtgccggtgtattcccaggtcatgtcgatctgcttgttgatcatcgcgttgcgggtgatcaccgtagccagattggtcttgggttcgacctgaaaacccttggcccgcaggtattgcacggtgatcgccgacagaatgcgctgttcggtaaagttcttgctcgccagcgtcagcggggcggcccaggcggccgcgccggtcatcagcaaggagaacagcagcgcgtggcggagtcgttgtaaccatcgagtcatcgcgtttctcccatcaggatgcggtgtgcgggctgagccggcggccgagaccggccagcgccagatcgagcagcagggcgatcagcgcggtggcggcggcgccgaggatcagcgtcgggaagtcgttcaggtagatgccggggaagatcagctcgccatagctgctggcgccgatcaaaaacgccagcggcgcggtgccgacgttaatcgccatcgcgatgcgcaccccggcgaagatcaccggcagggcattgggcagttcgacctggcgcaggcgctgcccggcggtcatgccaataccgttggcggcctcgaccagcgccggcggcaccgaacgcaggccggcataggtattgcgcacgataggcagcagcgaggcgaggaacaacgccaccaccgctggccggtcgccgatgccgatgatcaccatcgccaatgccaacaccgccagcggcggcagggtgttgccgacgttaaagatctgcatcacgtgctccgcccagcggcgggcgaaagggcggctcagcaggataccgctgggaatgccgaccagcagcgacagcagcatcgaacacaccaccaggaacatgtgctgctgaccgaggtaaatcaaatcttcccggcgcgacttgagggtttcccaaccgatgccgtaaaccagcagcgcgatgacggcgataaacagcaggctcccgaggagcaggcgccggtatggcgctgacttgtgcatgatgttgcgtcctccgttgcgcggagcggccgacgagacggcgcattccgctctgattgttacccacggcccggcgggcgtggcggtacaaaacgggcgtttcgcatgaggttagcgacattgagcgaagggtgcgttcggcacagcgtgctgaacgtaggctcaatacgtgagttaatcagcataagatactgatatttaaacccgagaaagcacgaagcccaaaggcgccggctagggaaggtatagcaccctgtcgttgaccgtgccaagttttatgaacaaaatcagctgattgagtttgcccgtattggcgccgcagcccgcgtcagcgctgggatgcgggtaaagtgaaaaaaatccacggcaaaacgttacgccgtaacagttagtccaaatggtgcgattcgccgccggcaaaggcaggatgtgagggcggatagacttggcgctggcgcttgctgatatactcagggaaaataaaaacgccaggaaacctgcataacgccatgacaaataacgtttcacccgcacccattgcccaccgcccgctgatcctgatcgcctgcatgctggcgatgttcatgtcggcgatcgaagccaccatcgtcgccaccgccatgccgaccatcatcggcgatctcggcggcttctcgctgctgggctgggtgttcgcggtctatttgctggcgcaggcgatcaccattcccatctacggccggctggcggatctctacggccgcaagcgggtgtttttcttcggcgcgacgctgttcctgctgggatcggtgctgtgcggcttcgcccccgacatgtattggctgatcggcttccgcttattgcagggattgggcgccggcgccatcatgccgatcgcgtccaccatcatcggcgacatctacagcgccaccgagcggccgaaggtgatgggttacctgtcgagcgtgtggggcgtatcggcgatcatcggcccgctgctgggcgcgtttatcgtgcaacacctgccgtgggcgctggtgttctgggtcaacctgccgatcggcctgttggcgatgctcttcctctggcgctatctgccggcgcatcagcaactgcggcggcacgcgctggatctggcgggcaccgcctggttgacgctgttcgtttcggcgctgctgctggcgctgttgcagatggaaagtctcggatggtgggtggcgccgttgctggcgctggcggcggcgtcgctggcgctgctgatccgccaggagcggcgcgcggttgagccgttgttcccgctggcgctgtggcaaagccgggtgatcgtcgccggtaacatcggcgggctggtgatcggcgcggcgatgatgggcatcagcgcctttctgcccaccttcattcagggcgtgatggggggctcaccgctggaggcgggcaccacgctggcgctgatgtcgattggttggccgctggccagcacgctgagcggccgtttgatgctgatgacttcgtatcgcgccacggcgctgttgggcgcgctgctgctggtggcgggcggcctgatcctgctgatgttgcagccggacggcggtctgctgtggggccgggtggcggcgtttatggtcggcgccggcatgggattgtgcaacacgacgtttttagtgtcggtgcagaacgcggcgcattacagcattcgcggcatcgccaccgcctgtacggtgtttacccgtatggtgggctcggccatcggcaccgcgattttgggcgccacgctgaacctcaacctgcagtggcgtttgccggagattgacgatccggtgcagcggctgatggagccggcggtgcggcacagcatggggagcgaagcgctggcgcagcttatccagcaggtggcggcttcgctgcattgggtgttcctggtatcggcgttggtgtcgttgctggcgctggcggcggcgatgctgatcccggcgcgttgtcggccgcaaggcgaagaggaagaggcggagcaggcgtaaaggaaaaggaaagggcgcggctgttgcgcgccctgggtagccgatgcggcttactgcgcgttggaggtgtcctggctggtgccggtctgcgccgcgtcaccactatcgtcgccgttgttcaggcgggtataaacgatcttctgggtgtcgttttcgcagtggccgaccacctggccgcccgcttgatcggcctgatcgttaggcacgatctccagtttgaagccggactccggaacgccgttattgacgattttttgcgaaatgtccgctttcacgctttcacaggaggccagagccgccaatggggcgccggccagcaaaacagcggttaatatcagcgttttcttcatcacgtcatccttttagacaatgaacttcctgtaacaggatagcagcaacggcggccgggtttcacgcttgcccgcccgccgcaggcggattaaggattaatccgacgcccggtctggcgatccagacatttacgggtgtccggttcccagtacgcgttgacgttgttgctgtcgttgcagcggtcttcgtcatccgccgcgcgatcggccttgtcgaactctttctcgacgcgagtgttgaccttgtggcgcagggatttggtatcattccactgctctttgctttggcgcgcttcttcggtgctcatcgcgccgctgcctttgccatcgacggtgacgcaggtgctgccctgcgtgcaggtggcggccagcgccggcgcctgccaggcgcccataacggccagcatggcgaccggcagcatcccgcgcagcagtcgttgggtcgaaaatgttttcatcgtttcatccttatgagtgagtgcgcctgatgatggcgacactggcgttacctcgcccgcaggcgtggtgataaatataccaccgcgctcctggaattcaccagccaagcgccgattcgtttactttaccgagagaaaactgcgaccgatgttaaaaaccacgctgttgtttttcgccaccgccctggctgaaattatcggctgtttcctgccttacctgtggctgaagaagcagggcagcgcctggctgctgctgccggcggcattaagcctgatgctgtttgtctggctgttgacgctgcatccggcggccagcgggcgggtctatgcggcctacggcggtgtgtatgtggcgactgcgctgctgtggctgcgggtggttgatggggtgaagctgtctgcgctggattgggtcggcgccggcgtggcgctggcgggcatgctgattatcgtttccggctggcgcgcggcctgaggaaacgcggcgggagttgcctcccgccgtcgcggctcaggcgccgcggtggatgttcagcccggcgaaggactggctgaccggcatcatttccagcgtgttgatgttgacgcgcgccggcaacgtcgcgacccagaacaccgactcggcgatgtcttccggcgtcagcgcatcggcgccttcgtaggttttgttgaccttgccgtcatcgcccttgaagcgcacgttggagaactcggtgccgcccaccaggcccggttcgatatcggtcacgcgaatgcgcgtgccgtgcagatcggcgcgcaggcccaggctgaactgtttgacgaacgctttggtggcgccgtacacgttgccgccggcgtaaggccagttggcggcggtggagccgatgttgatcacatggccgacgttgcgctcgaccatggccggcaacagcgcgcgcgtcatgttcaccagccctttggcgttggtgtcgatcatggtttcccagtcatcggcgttggccttgtgcgccggctccagccccagcgccagcccggcgttgttcaccagcacgtcgatctggcgcagctcggccggcagtgcttcgatcgcctgttgaatggcggcgcggttgcgcacgtcgagccgcacgatgtgcagcgcttggccgagttcttcctgcagctcttcaagacgctcaaggcggcgcccggcggcgatcacacgatggccttcacggataaaacggcgcgcaatggcctcgccgaaaccggaggtggcgccggtaacaaaaataatcatgttgctgttcctcaactgtttttaccctacatgcctctatcattagcacaaacccgcaggcagtggcaggggttatcacggcggaaagcaaaaaagatgacaccgggccggcggcccgatgctgactagcgctgaggcggcaggtgatacaccacggcgtcatacttgatgcgctcgcaacggccggccagcacgccgcccagcgactcgacgaggcggcggctggcggtattctgctcggccaccgggtagagaaagtgcggcggctgaaagcgctcgctggcccagcgcgcgatgccctgcacgatttcgcggccgtagccctggccatgcaggctctctttaacccagatgcccagctccggggtgtggctgcgcagattatgcgcgccgccgacgccgacgaactgccggtcttcgcgccggcgggcgacgaagatcacttcttcaccttcgcgcatcaacggcagccagccttgccagacgttggcgaaatcctccggcgacgcctccggcgacgcctccggctcaaaggtcataaagcgcgtcagagtgggggtgatcgcctggtaaacatcgtcggcgtctgctgcggtaaagggggcaatcaacaaacggtcggtgtcaacgcggcactgagaaaggtcattatgattcatcttattccctcgcttttcaggccagaatggcaaaaaaatccgcgcccataagttggggcggatcgtcgatattacgcgcattggcgtcagaagcgacttatttttcgccgctgcggcggcgcggaggaacggctttatgtgacggcgtcacgttgatgagaaagacggcgagcacggttaaccgcgcccgccgctgcggatcagaacttcaccgaaccttgcagataaatcgtgcgcggctggccgatgtacagacccttgttgttgtcgtcataggcgcgggtgaaatactcgtggttgaacaggtttttcacgccgacgcccagattcaggccggccatttccgggccgaaatcataggcggcgcgcacaccccacagcatgtagccagggatgcggccggtgctgccgtcggcgctttccgccacggtgttggcgttgtcggcgaactggctggactggaactcgccgttaaggttaaacgcccagttgcccggcgtgtagtccagccccagcgtgcctttatgcttcggcgagaacggcacctggttgcccttgtagccgccgtcttcgcggatggtggcgttgacgtaggcgtagctggcgtaggcggtcaggtcgtccagtttcggtgtcagctgcgacagatcgtaacgcaggctgccttccagcccggcgtggcgggttttgccgcgcgcggtcacgctgtcggtcacctggttggagtcgtactggttgttgaagttgatcaggaacagcccgatctcgccggtcagcgcatcgccggcgtagcgggtgcccagctcccaggtgcgcgccttctccggttcaattttgccgctgtcgaccgctttgcccatctggctgtattgcacggtgccgaaggagccttcggtgttggcgtacaggttccagtattcgttcaggtgatacatcacgttcaacgccggcagcggcgcgttatagctgacgtcgaggcggttgttcttgatgtagttgttctgatacgacttgatgtactcgtaacgcatgcccggcgtgagggtccagtcgccgatgtcgatgcgatcgtcgatataaaacgcgtgcgcctcggtgccggactgggtgtcgcgatcgtacgggctggcggtggacggcagcctgccggtgctggctttgctggtgtagcgcagttcgtgggtggattcgctgacgtagcggtagccgacgccgacctcatgcgccgagtcgccccagcggaagctctggctgtagcgcggttctacgccgcgcacccagtattcgcgcggcgacagcgtcaggttcttgccctgatccagatagccgctgcgcagggtgtaggtgtagaagctctgcacgtcgaacttgtgctgccgatccggctgatattggtagccgaagttcgccaactggcggcgaccccagaacttgtcgtacgggcgcgtcgactggaacgggttggcgttgtagtccgcccggctcagtccgcccggcatgttcgcttcgccttcgtagtattgcagcaggctgttgaaggtgtgcacctcgttcggggcgtagcggcttttcagcatcacgtcgtcgattttggtcgcgctgtgctcgcgccagtcgctgccgcgggtgccggagtagagcagcgccgcgccgaagccgttgtcggcggtgccgccgatcatcaggttgccggtgcctttcgggtgatcctggcgcgaggtcgggctgagctgcccctgcatgccggcctccatgccgaaggttttcgggatggcgcgggtgacgaagttgacgacgccgccgacgctctgcggcccgtagcgcaccgcgccgccgccgcgcaccacgtcaatcgcatccatattgccgagcgagaccggcgccagcgacagctgcggctggccgtaaggggcgaagggtaccggaatgccgtccatcagcacggtggagcggctggcgaggcgcgggttgaggccacgaatgccgaagttcagcgccatatcatggctgccggtgccgttgttctccggcgccaccacgcccggcacgcggttcaacgcttcgcgcacggtggtggtgccggttttggcgaagtcttcgcggcgcaccacgtcgcgcgcgccggggtgttcgaacacgtcgatctggcggccttccgccagccagtcaccgactaccgtgatgtcctcttccttgtgcggctgcggcagtgtggccagcgtgtaaccgttgttgccgagcgctttagcctgcaggccgctgcccgccagcagggcgttcaggccgtcgtcgacaccgtagctgccgttcaggcccggcgaacgtttacctgcggttaacgcgccgtctaccgagagtgcgatgccggcgcgagcggcgaaagcgttcagcgcgccgtccagctcaccggctggaatgtgataggttgccgcggcgctggcggcgctcgccatcagcggtgcggcgaatgccaggccaatagccacggccagcggtttggcccgttttccccaaagcgaagccggagcgacctttccccaagcgttgttcataccttctcctgaatcatttttatttattgctgcagtgttttcctgggagtcggatgagcaaggcaaaagggacaatcaaaaatgcgattttttatcattttcatttaaaaagattcaggcggggacgatttgcagccaatagcgggtaaagctctgcagacgtatcggcagggtctggctgagcagggcgagggcgcgatcggtatcgttgagcgggaaactgccgctgacgcgcaggccggcgacggccggatcgcagctcaggtggccgcgccggtagcgcgccagttcggcgatcccccggtccagccgccactggctgacgctcagcacgccgcgcagccagccgtcctccgccgcagccgattgcttgtcgccgaaggccgtggcgctgaagctaatctgttcgccggcgttcacccggcgcgtttgccgcgcgtcctgcgccagctgcgcttcaaccgcatgctccagcaccgtcaggcgcgtctcgccagcgctctcacgcaccaaaaagcgggtgccgagcgcgcgcatcgccccctgcgggctttgcacccacagcggccgggggtcgtgtccggtgatcaggctgatttccccggcgtgcaagcggatcagccgttgacgattgtcgtaatgtacgtccaccgcgctggcggtgttcagcaccagctgggtgccgtcgcttaacacaatgggtttgatctcgccggtggcggtgcggtagtcggcgcgtagctcccggccgaacggggactgataaaagaagccgccgccgcccacgccgagcaacagcagcaggcttttcagcagggtgcggcgatcgatcgccgcctggcggccggcgctgtcgagcgcacggtagctgaacttgcccggcacgccctgcagctggctctgcaacgcttcgacgcgccgccatgcccagcggtgatcgtcatgctgctggtgccaggcttgccactgttggcgctggcgctcggtgacgtgctcgtcgcacagcagcgcataccagtgtgcggccattttcagcgcctggcgctgctcgggggtgatggcgttgctcatgaataaacgtcgttttccaggctgaacagcaggcaatgctcggtggctttggccatgtattttttaaccgagctgaccgacacgccgaggcgcgcggcgatgtccgcatagcccaggccttcgagctgcgacaacagaaaggcctgcttcaccttgggcccgaggccgtcgagcatggcgtcgatctgctgcaggctgtccagcaggctctggcgctgctccggcgacggggcatagccttccgggatcagcgccagcatctccagataggcgcgctccagcgttctgcggcggaacagatcgaccatcacccgtttggcgacggtgaccaaaaagtctttcggttcgcgcagggttgccgcggcgtcgcttctcagcaggcgcataaaggtgtcctgcgccacatcgtccgcatcgaacgcgcagcccagccgccgacgcaaccatccctgcaaccaggcgtggtgggtggcgtaaaggcgcgacagcgcggcgtgcggggcagaggcggtggcggacatggttttcgcattgctggtcaaaaagatgcgcggatgataattgagaatggttatcgtttcaagtttggccgttgtccttaggccgagattcaacccccaggcgtggtgttgaaataagccgtgcgccgtgaagatattcgcttgctcattcaaggtgcagcgacgcgatgttattttggcaggcaaacggttgctatttatccgccgtcgaagactgagcgtgggtcttattctctttcgccggcctatgctttcaggttaattaccaatcaattgtttttatttaaaaatatattttatcgccgcctgttggcatgcggcttgctatgcttaagccggtctttacgtttgggcaaaaaagccttgtttcatcggcgcaggttatttcgcgggtgagcttggccggtcgtcacaaggaagaaaataatggcactgcaattcaccacggctattcggggcaatttttttgatatcgcagcctgtgtggaggcgccgcaacagctcgaggaacgcctgcggcatgttcccgacggtttgctgctgctgaacgacggcgtcatcgtctggttcggcagctggcagcagggcgaggcgctgctgccgccgggcttcacggtcacggaatatcacgacaagctgatcgtgccgggatttatcgatacccacatccactacccgcaaaccgaaatgattggcgcctatggcgaccaactgctggactggttaaacaattacaccttcccgaccgaaagccgttatgactgtgagcagcacgccgatgcgatgtcggccttctttttgcagcagttgctgagtaacggcaccaccaccgcgctggtgttcggcaccgtgcatccacagtcggtcgatgcgctgttcagccaggcggcagcgctgaacatgcgcctgatcgccggcaaggtgatgatggatcgccatgcgccggaggcgctgctggaaacgccggcgcagagttaccgccagacgcgtgagctgattgaacgctggcacggcaaaggccgcctcggttacgccattacgccgcgctttgcgcccaccagtacgccggcgctgctggcgcaggtgcagcggctgcgcgaagagtatcccgacgtttggctgcagacgcacctgagcgagaacccgcaggaagtggcctgggtaaaagcgctgtttccgcagcaccgcagctatctggatgtttaccaccgttatggcatgaccggcgataaaagcgtgttcgctcactgcctgcacctggaggagcaggagtgggactgcctgtgcgatacccgctcggcgatcgccttttgccccacctccaacctgtttctcggcagcgggctgtttgacctgcagcaggcctggcgcaagcgggtgaagctcggcatcggcaccgacgtgggggccggcaccaccttcaatatgctgcgcacgttaggcgaggcgtacaaggtcggccagctgcagcattaccggctctccgccgtagaagcgttctatcatgccaccctgggcggcgcccgcgcgctggcgctggacgacaaaatcggcaacttcaacgtcggcaaagaggcggatttcgtggtgctcgatccggcggtgacgccgctgcagcagctgcgtcacgccaacagcgccacgttgatggagcaagggtttgtgctgatgacgctgggggacgatcgcaacatttatcgcacctatgtggacggtaaggtggtttatcaggcggcgcgctgacacagccgcattcattcctggtattgaagcgtccaacgtcgctgtctttctctggttattgtgcgggaaaaggcgggagagacgtgaagtcattggtacagggttaacactgttgagcggatactatttatttatcaggaatgacactgcgcgtatttttaattaaacactatataaaggatttattgctcatgctcgtatctgacccccgttatcacttgttagccgtctgcagcgctcagcatctgcgcgctgtagctgaaaggatctgtgctcgcgataaactagaaccgctagcatttgatgctgttctttggcggagttgttggacatcaccactgccaaccatatcgccagagtcgtcaagtgagtttttgcaatcggtggggcatgtttatcctcgcgccacttatgagctaaggtcttggctcatctctggcggacgtaagttggatctgcaagctgccgacaagctgatttatcttgctcgcgtgatcgagaaggagtggaaagttgaagagcaaccttctgtttggcgcaagcaccccagcaacaggcttaatggttatgcatacaatatcgtacagattcttatacataccagcgtatctgaggactatccaaaggagaataatatctctcaccggcatgatttgcttacgcattcaccgagtaactcaaggctcacggcttggatggaaaaatatcaacatagctcaaaagatccctttgttttcgcacggcttgatgtgacacgtatcagtaatatgagggagttgtttctgtggcagatttcgcttgaaacccgtagcggattatatacttcggcaaccttcgaggctgcagtggggaaaagaatcaggtcatacgatcgtccggtgcccggtcggcgcattcaagcgtttataggttatatctaatcgagttaacgcaccgctatacgccacagggagcgaatcatcatgggaggaatattctaatcacttgtttttgctcaaactgccaactgcgcctaagctaggtgatgactcagagggagccattccccgagaccttattccgtgaacatggaggagtttcgatttgatgcgtttatccacattggtgctggcgatcggcatggcgctgggctcgcaggcacaggcagcagaaacccaacctcacgccgaccatagcgcgctgcccagcggccaggcgaaggaggctaccgtgaccggtgaagccaatcagcacgacaagcaaaagacccaaaacccgttcttctatcaaagccgtctgccgttccaggcgccgccgttcaacctgatcaaggagagcgactacgcgccggcgatcgaagcgggcatcaagcaaaagcgggaagaggtggagaagatcgccaacaacccggccaagcccaactttaaaaataccttcgtggcgctggagcaggccggttcgctgctgacgcgggtgatgaacgtgttcggcgccatgacctcggccaacaccagcgacgcgctgcagaagctggatgaagagacctcgccgaagctggcggcgctgaacgacgacatcatgctcaacggcaaattgttcacgcgcatcaaggccatttatcaggatcgcgatgcgctgaagctggatccggaatcgcgccggctggtggaagtgacctacaagaacttcgagctggcgggcgccaacctgtcggacgccgacaaggccaagctgaaagcgctgaaccaggaagcggcgacgctgagcacccagttcaccaacaaactgctggcggcgagcaaaaacggcgcgctggcgataaccgacccggcgaagctggacggtctgtccgaaggcgaactggccgcggcagcgcaggcggccgccgaacgcaagctggagaaacagtggctgctggtgctgcagaacaccacgcaacagccgttgctgcagagcctgaaagatcgcgacacccgcaaagcgctgttcgacgcctcctggacgcgtgcggagaagggcgacggcaacgatacccgccagaccatttcccgtctggccaaggtgcgcgccgagcaggccaaactgctgggctacccgaactacgccgcctggaagctgcagaaccagatggccaagacgccggatgccgcgctgagctttatgcgcaacatcgtgccggcggccaccgcgcgcgccgagcgtgaagccaaagacatacaggcggtgatcgatcagcagaaaggcgacttcaaggtgcaggcctgggactggcagttctacgccgaacaggtgcgcaaggccaagtacgatctggacgaatcgcagatcaaaccttacttcgagctgaacaatgtgctgaacaacggcgtgttctacgccgccaacctgctgtacggcatcagcttcaaagagcgcaaggacatcccggtctatcagccggacgtcaaggtgtatgaagtgttcgacaaggacggcaaatcgctggcgctgttctataccgattacttcaagcgcgacaacaagggcggcggcgcctggatgagcaacttcgtcgatcagtcgaagctcaacggcaccaggccggtgatctacaacgtcgccaacttcaccaaaccggcgccggggcagccggcgctgctgtcgtatgacgacgtgatcaccatgttccacgagttcggccatgcgctgcacggcatgttcgccgatcaggagtacccgagcctgtcgggcaccaacaccgcgcgcgacttcgtcgaattcccgtcgcagttcaacgagcactgggtcagcgatccgaaagtgttcagccatttcgccaagcactaccagaccggcgaggcgatgccgcaggaactggtcgataagatcaagaaggccgacaagttcaacaagggctacagcatgaccgagttgctgtccgccgcgctgctggacatgcactggcatatgctgaccgccgatcagccgcagcaggacgtggacaagttcgaggccgagtcgctgcaaaaagacaaggtggatctcagctatgtgtcgccgcgctaccgctccagctacttccagcacatctggggtaacggctacgccgcgggctactacgcttatctgtggacggaaatgctggcggacgacgccttccagtggttcaccgaacacgggggcctgaccgccgaaaacggccagcgcttccgcgacatgatcctgtcgcgcggcaacagccaggatctggagaagctgtacatcgactggcgcggcaaagagccgagcatcgagccgatgctgatcaaccgcgggctgaaggacgagtaagttcggccattcccggtaagcaaacaaaagggcgcgttatgcgcccttcgtctttttggcttggccgacagtcagcggttcaccaccttggccggcagggccaccaccagcagcgagctgagcagcaggcagccggcgaaggcccagagcgcgccgccgctcttgccggtcagatccagcgccagccccatcagcgaattgctcaccagcccggcgatgttggccagcgagcaggccagcgcgaagccggtcgccgccgccgtgccgcgcaggaaggtggccggcaggctgaagaacaccggcaccgcgccgatgatcgccgcctgggcgatggagaacagcagcaccgtggccagcgcattgtgggtgaagaaggtgctgccggccatcgccaacgcgccgacgataaacggcacgatgatgtgccagcgccgttcgcgcagccggtccgaactgctgccgatcagcagcatgccgagcagggcggcgacgctggggatcgccgtcaggtagccgatggtggtgatgtcggtgacgccggcggttttgatgaaggtcggcatccaaaagcccatggcgtaggcgctgagcagaatggcgaagtcgatgccgccgagcatccacactttcaggttgaagaagccgtcgcggaagctgtgcttgccgtgatcggcctcggcgtcgtcacgcgccaaatcgtcggcgatgcgctgcttttcctcgggcgtcagccacttggcctgctgataagtgttaggcaacagccagaaggtcagcacgcccaacagcacgctgggaatgccctccagcagaaacagccactgccagccgtgcagcccgtggcgcatgtcaaaatggcccatgatccagccggagagcggcccgccgatcacgctggagagcggcaggccgatcatgaacagcgcgatgatgcggccgcggcgataggtcgggaaccacagcgtcaggtaaaagagcacgccgggcaggaaaccggcctccgccacgccgagcagaaagcggatgacgtagaactgcgtcggcgtggtgacgaacatggtggcggtggacagcagcccccaggtgatcatgatgcgggcgatccacatcttggcgccgacgcgctgcaggatcaggttgctcggcacctcgaacagaatatagccgacgaagaacagcccggcgcccaggccgaaggccgcttcgctcagctgcagcgcgtcggccatctgcagcttggccagcccgacgttgatgcgatcgaggtaggccgccagataacacaggcaaagaaacgggatcagtttccaggtgattttgcggtacagcagcagcgattctgcgtccgctttccccgccagcggggtgtcgacaatggccatgatgttgtctccaggtggtgcgtgttggcctccgcaggaggcgcctgttgtgtttgcgtgcatggacgccgccctgtttcgggcggtcgcctgaggcgctgtctgcgccttcgttattgtcgttgcaggtgaatcgttgattcataaccggttcagatagtcgagcgcctcccgtttgtgcaccacgtcgccgtatttgctgtcgatgtcgaacaggttggcttcgtgcgggccggggtgacgatcgccgacgcactcgcgcaccaccatggcgcgaaagccgtgctgcaccgcgtccaccgcgctggcgcggatgcagccgctggtggagcagccgatcatcagcagcgtgtcgatcccttgcgccaccagcagcggcgccagcgcggtgccgaagaaggcgctggcgtattgcttgctcagcaccacctcatcgcccagcggcgccaccggcgggcagaacgccgccagcgggttgccttccaccatgtccttcatcaccggcgctttcttgacccacaggccgccatcggcaaaatggcctgcatgatagcggatatgggtgtggatcaccggaattcccgttcggcgcgcacaggccagcagctcgcggctttcctcgactgcgcttactacgcccggcgcgaacagcggcgcgccttcggtggtgtaggcctgcataaagtcgatcgccagcagcgccgggcgccggccgaagccgatgcgctggccccagacgccgcgatagttgtcgctgagggtgtcgttcattctgcctcctcaataggcgccggacagcagggcgccggcgccggggacgatcggctccagctccagcgcggtcagcatcgcgtaagtggtggcgatggcggcggtgatcaccggtttgccggtttgggcctccaccgtcgggacggccggcagcgaaggcatctgcacgcaggcggacagcacgatagcatcgacctcgcgtaagtccatctcggcgacgatccccggcagcctggccggatcgtgccggccgacttcgaggttgtccgggatctccagcgcgcgccataccttgacctcgatgccttcgtgctggatgtagtccaccaccagctgggtcagcggtttcatgtagggcgccaccagcgcgatgcgtttggcgccgatcaccttcaggccgttgaccagcgcgccggcgctgctgataaccggcgcggcggcctgattgtctttcgtcacctgcgccagccgggcctgcgattcgcggtggtagcccagccccatcgccatgatggccaccaggcaggcgtagccgagcacgtcgacccgcgcgtcggacagctccagcgcgcagcgatcggactcggcgtccatcgccgccaattcttctttattgacgtgtttcatgcgcatgcggctggagtgaaaggtgaaacgctccgggcgtatcagctggcgcgcgcccagcatcgccgggatctcggtttccatcgtggtgttggagctgggcacgatctggccgatgcggtagtggttgctcatgtcggtgttcctcagttaatccagaaaatcgcccagggcgcggaagaagccgtcgaaatcgtcccacgggatcatgtgtccggcgttctcgacctcgacgatggcgatctccggctgcagcgcgcggatctccgcccggtcttcgggctgaatgacgccgcctttgcccgcggccatcagcagcgtcggcatggtcagctgcgggtagtcgcggtggctgtccacctgatgaaaatcgtcgtaggcgcgttggatagccggctcgtagcaggtatgcagccactcggcgcgcagctgacgctgttcttcgctccaggttgggcaaaaggcgcgcatctgctcggcgctcatgcccggctgcgactgccggatggagtcggcgtaccatggccattggccgggataggcgcggcggccggggccggaaaccggcggatcgaccagcaccagccgccgcacgccggcgggccgcaaagcggcggcgcgcagggcgaagcgggcgcccatcgaatggccgagcagggcgtaactgtccaggttcagcgcggcggcgaaggcgttgacgtcctgtgcgcaggtctctgcgtcataagccagttccgggccgctggacgacaaaccgcggccgcgcacgtcgagcacgtagacgtcgtatttttcccccagccgctcggcgacgaagccccaggtgatcgccgggctggtgatgccgggcaccaggatcagcgccgggccgtggccgccgtagcgcagatagtgttggcgaatgttgttggcgtgaacgtgggcgccgtagaggaaggtgctcatgcggcgttctccgatttcagcgcttgcgcgtacaggtcatagccgtaaacccaggccggatcttcctgggtgcgcaggaaggtgttggcgttggacaccgcctgcaccctggaggcgcgttccttgcggttggcttcatacagctggaaggcggtgcagtagtcgccgaggccggtttcctgcaggcagcgggtcagcatggcggcgtcttcgatcgccatcgccgcgccctgcgccatgtgcggtttcatcgggtggcaggcatcgccgagcagcaccagacggccttcgctccacaacggcagcggtttgcggttcagcaatggccatttggtgacctgttcgctggattcgatcagcgcctgcacgatcggatggtagccggcgaaggtctcgaacatctcttcgcggctgctgtcgatgaagctgccctggaaatcccaggccgggtgcggcacgccgctgacgtagtaatattcgtcgcgccgttgggtggtgtagtagaccatcagatggcgatccgccgaccaccacttcacgcagtcttcgaacgtcaggttgtatttcgccagcttctcgccgcggatcagcgcgcggtgggccacccagccgctgtaggtcggcgcttcggcgcccagcagatgctcgcggatgcgcgagttgatgccgtcggcgccgatcacgatatcagcgtgggccgaggtgccatcgacgaagttcagcaccacctcgtcaccgcgatcttcaatcttgctcaggcatttgccgaagtgcagggtgccgggctgcagcgcggagagctgcaacgcctgcaaatcgccgcggtgcaccgtcacataggcggcgccgtactcccggcgggcgaaggcgcccagttcgatgcgcgacaggtagtcgccgctttcggcgtcgcggctgaaccagaaatcgggatgagacgccatctgctccaaccgttgctcaataccgagacggcggaaaatcttcagcacgttcggccccatgtgaatgccggcgccgaggcgcgagaacgccgggctctgctcatacagatcgacggtaaagccggctttttgcagcagcccggcggcggcggcgccccccagcccggcgccgacgacggcgatgcgtggttgtttgctcatcatgtttcccctgtctgttggcttttttcagcgtaggcccaacgcatggttggacgattgatttatagtgtatgcactagataacgcaaagttgcaaaagtgttaaatcagatcttgctcacgctaattgacagcacattactgttaaactcatgttaatcacaggattgataaggcatgaaataggactttcttatgatggccatctgtggcttgctttctcttccttttttgacttagataaaatgagcgtgttcactttaaatcgtttgaaaaataaccgccgccttgcgggcgtcggatacccttgacgtgacaggagacaggccatggcggtcaatgaaacccagttggtacagctgttcgagcaggtgcttacgctgtcgaaggtcgatgcttcgcagagcgtggcgattttgaaaagccattattccgatgcgcgcacggtgcgcgccgcgaccgacgcggcgctgcggctgggcgccagggtgtatgccgtcgaactgccggcgttcaaccatccgcgggcgatgggcaacgacatgaccgcctattgcggcgataccgcgctgaccggcaacctggcggcgcagcgtgcgctggaggccgccgacctgatcgtcgataccatgatgctgctgcattcgccggagcaggaacagatcctgaaaaccggcacccgcatcctgctggcggtggagccgccggaggtgctggcgcgcatgttgcccaacgcggaggacaaagcgcgggtgctggccgccgccgccgtgctggagcaggcgaagctgatgcaggtgacctccgccgccggcagcgatttccgcgcgccgctcgggcaatatccgacggtgaccgagtacggctatgccgatgagccggggcgctgggatcactggccgagcggtttcctgttcacctggccgaatgaggagcaggcggagggcgtgttggtgctggaggttggcgatatcttgctgccgttcaaaagctatgcgcgcgaacgcatcacgctggagatcgaacaagggttcgtcacccgcattcacggcggttttgaggcggaatacctgcgcgaatacatgaaatactttgacgatccggaagtgtacggcatctcgcacatcggctggggcctgcagcctcgcgcccagtggacggcgatgggcctgcacgacaagaacgacggcatgtgcatggacgcgcgcgcgttctacggcaacttcctgttctccaccgggccgaataccgaagtaggcggcacgcgcaaaacgccttgccatatggacatcgcgctgcgccgctgcgacattcgtctcgatgggcaaacggtggtggcggacggggaagtggtggcgccggaggcgtcgcgcgtgcgccgggcgtaatcgttgctgccaacggcgggggtttgtactattctcgtggattccatagatggtgagagtaacgcaatgacgccccccgaatacccgtcagccgtgagcggccaacccgaaaattatcattttaccgagcaagtcgggcacctgctgcgcaaggtttatcagcgccacgtggcgattttccagcaaaacgtcggcgattcgcagctgacggcggtgcagttcatcaccctgtgcgcggtgcgcgatatggggccgagctcgctgaccgagctggtgcaggtgacggcggtggatcaagccaccatccgcggcatcgtcgagcggctgaaggcgcgcgatctgatcacggtgacgccggatccggtggatcggcgcaaggtggtggtcggcctgaccgacgccggcggcgcgctgctggcggaaacggtgccgcaggcggccaaaatcacagaattgacgttcggcacgctgaacccggccgaacggatagcgctgatattcctgctgaataaaatgctggaagaccccgccaccggctgattcgcccgcgcaacgtcggttgcctggtggtcggtggcgagaggccagcccataagaccatcaagtgcaggcggagacgcaaacaatggcgatatctgaagtgcaatcgcccagggaaggcgcgaaaaccacgctgacggagcatccgctgatgctgtcggtgaacggcgaacagcttcatgcgcaggtgatggcggatacgccgctcttgctggtactgcgcaacgatctggcgctcaacggcccaaaatacggctgcggcctgggcgaatgcggcgcgtgcaccgtgctgatcgacggcgtggcggcgcgctcctgcgtgatcccggccctcggcgtgtccggccgggcgatcgtgaccctggaaggtctcggcactcgccggcgcccgcatccggtgcagcgcgcctttatcgaagagcaggcggcgcaatgcggctactgtctcaatggcatgatcatgaccaccaaagccctgttggatcgcaatcccgccccgagtgaggcggagatccgtcaggcgctgtccggcaatctgtgccgctgcggcacccatcttgaaatcctgcgtgcggttcagcgcgccatcattctctgccgcgatgaggacgcccacgatcatgactgattcccgtaccccatcgccgagccaggccgaattgctgcagcgcgacggcgttctgttgatcgtcgacagcgtgcaaccgccgccggggctggtgcccaaggggcaaacgccggtgctgaagcccaaggagcaagggttgtttatcgccctgtgcggcagcggtgaaatctatgcctttaacggccatgtcgatctcggcaccggcgtgcgcaccgcgctcgggcagatcgtcgccgaagagctgtacctgcgcatggatcaggtgcaaatggtgttgggcgataccgagcgcgcgccgaatcagggcgccaccatcgccagcgccacgctgcagatcgccgccgtgccgctgcgtaacgccgccgccgaagcgcgccgttggctgttgcgccaggcggcgcagcgcttcgatgcgccggtggaacggctgacgctggaggagggcgtgatccgcagcccgcaggggcaggcgctgagctacgccgagctggtggccggcggtcatgtcgagctgtcgatttccggcgacgcgccgctgaaaccgcaggcggagtatcgcctggtgggcaccagcgccgcgcgcgtcgatattccggccaaggcgaccggcgaaaccacttacgtacacgatatgcggttgccgaatatgctgcacggtcgggtagtgcggccgccctatgccggttacgacagcggcgaatttgtcggcaccagcctgctggcggtggacgaaacctcgatcgcgcatattcccggcatcgtcaaactggtggtgatcggcgatttcatcggcattgtcgccgagcgcgaagagcaggcggtcaaggcggcgcaggcgctgcaggtcagttggaaagactggcggcgcaatttgccgcagatgaccgacgtggcgcaggcgctgcgcgacaacccgcattcgacccgggtggtgcacgataccggcgacgtggacgcggcgctggcggcggccgacaggcgtttcacccgcagctatctgtggccgtatcagcttcatgcctcgattggcccttcctgcgcgctggcggactaccggccggagcgtctgcaggtctggtcaggcagccagaacccgcacctgctgcgcgccgatctggcctggctgctggagtacccggaagcgcagatcgagatcgttcgcatggaggcggccggctgctatggccgcaattgcgccgatgacgtctgcgccgacgcggcgctgctgtcgcgcgcggtgggcaggccggtgcgggtgcaactgacccgcgaacaagaacatgtgtgggaaccgaagggcacggcgcaactgatggaggtggacggcgggctggacgccgccgggcacccggtcgcctacgattttcgcacctattatccttccaacggcgcgccgacgctggcgctgctgctgaccggccgggtcgagccgctgccggtggcctatgaaatgggcgatcgcacttcggtgccgccttatgagtatccggcgctgcgcgtcagcatcgaggacatggcgccgatcgtgcgtgcctcctggatgcgcggcgtttccgccttgcccaacaccttcgcccacgagtcttatatcgatgagctggcccacgccgccggcgtcgatccgctggagtatcggctgcgctacatcaatgatgaacgcgccagtgaactgatgcgcagcaccgcagaacgcgccggctggacgccgcataccgaaccgatgcagaccccgacggaagacggcgtgctgcgcgggcgcggctttgcctatgcccgttacatccacagcaagtttcccggctttggcgcggcctgggccgcctgggtggccgacgtggcgatcgacaaagccagcggcgaagtggcggtgacgcgcatcgtggtcggccacgacgcgggcatgatggttaacccggacggcgtgcgccaccaaattcacggcaatgtattgcaatcgaccagccgggtattgaaagagcgcgtgacctttgaggaatcgacggtctcagccaaagaatggggggcctacccgatcctgaccttcccggaggtgccggaggtggacgtggtgatgatgccgcgcccttacgatccgccgctgggcgccggggagtcggcgtcggtgcccagcgcggctgccatcgccaacgcggtgttcgacgccaccggcattcgttttcgcgagctgccgatcacctcggacaagctgcgtgaggcgctgaacgggccggatgccgaacggcaggccgcgccgcccaagaaaaagaagcgcggcaaatggtggttcggcggcgcggcggggctgttcggcgccgtgctgggcatcgccggcagcgccttgccgtggcgggcggagatcgcgccggtggcgacgcccggcgccggcacctggtcggccgccacgctggagcgcggccgtcagctggccgccgccggagactgcgcggtttgccataccgcatcggaaggggcgaccaacgccggcgggctggcgatggcgacgccgttcggcacgctctacagcaccaatattaccccggacgtggcaaccggcatcggcaactggtcgtttaccgcgttcgatcgggcgatgcgccagggtatcgcccgcgacggccgccacctctatccggcatttccttacaccgccttcagcaaaatgaccgacggcgacatgcaggcgctgtacgcttatctgatgtcgcaaccggcggtgcgccagagcaacccggccaatcagatgcgtttcccgtttaacctgcggccgctgatggccggctggaacgcgctgttcctgcgccagggggaatatcaacccgatccgcaacaaagcgcgcaatggaaccgcggcgcttatctggtcaacgggcttggccattgcgccgcctgccattcgccgcgcaacctgctgggggcggaaaagggcggcgcggctttcctggcgggggggatggtggacgggtgggaagcgccggcgctgaatcaattggccaacgcggacaaaccctggaccgaggaacagctgtttcagtatttccgcagcgggcattccgtcgagcacggcgtggcggccgggccgatggggccggtggtgagcgagctggcgacgttgccgcagagcgatctgcgggcgatggccaattatgtgatgtcgctgagcgccaaatcgacgctgaacgtggaaccgcaggcgcagttggcggctcgcgcattgccggcggtggggcaacttgccggtgagcggttgtttcagggcgcttgccaggcctgccacagcgccgccgccggcgggccgcagctgttcggcgtcagcccggatctggccaacaacaccaacatcttcagcgatcgccccgataacctgatcaaggtgatcctgcaagggatccccaaaccggccaccgccgaattgggctttatgccgggctttaaggacagtttttccgatcggcaggtaacggcgctggtgaattatttacgccaacgctatgccggcgacaaaccggcctggcgcgacgtggaggcgcaggttgcgcggctgcgcgcagagccgggcacgcactgagccgcctcaggcatggcgcaggaacgccaccagccgctgcgccggcagcggcaactgcgcagggtcacgcaccgcgatcgacaggcgccgggtcgcccaatcgtccgtcagcggcagtgcgctgtgccgaatttccggctggcgttgtgcgctctcttccggcaccaccgccagcccggcgccgcgcagcaccatgcggcagatggcgtcgaaatgagcggcacgcgcccgcagccgcatcgggccgccgctgcgtatcgccaattgctcaagatgctgttgcagcgcgctctcttccggcaggccgatgaaatcaaaaggcagggcgtccgcaaagctgacctgccggcggccgctgagcgcatgccccggcggcagcgccagcaccagacgatcctggcgaaaagggtaacttgtcagcccgcgcagatcggcgtgatccgcgacgatgccgatatccgccgcccgttcggcgattgcctgcgcgatggccgggctgggcagctcttccagcgcgatatcggtgtgcgggtgcagcatcagaaaatccgccaacagctccggcaaaaaggcgtcggcggcgacggtattggcgacgatgcgcagctggctgcgctggcccggcgcgaactcggccatatcaccgcgcagccggtcgcgctgctgcaatagcactcgcgcgtgatgcaacaggcgctcaccggcgggcgtcgcctggacgccgcgcggattgcgcgtcagcagcgctacgccggcctgttgctccagcccgcgcatgcgggcgctggcggcggccagcgacagcccgacgcgctcggcgccggcggtgatgctgccggtctcgagcactgccgccaacagccgcagatcgataaagtcaaaatgcatgcgttttccctctgtctttgccgcaggcaggctctgtcattgccgcattgtgccgcggcgcggcgctggccacaatcgagccgttgattcgccataaggatagacgcatgtcgctgacgttactcgaaattgtcgccctgacgggcatttttacactggccggcacggtcaaaggggcgatcggtctggggttgccgacggtgtcgatggggttgctcagcctgatgatgccgccggggcaggccgccgcgctgctgctgttgccctcgctgatcaccaacctgtggcaactgctgtgcgggccgacgctgtgggcgctgtggcggcggctctggccgatgatgctgtgcgtcacgctgggcacattgttgagcgcgggggcgctcactgccggcgacggccgcctggcgccgctggcgctgggcatgtgtctgatcggctatgcgctgctgggattcacccgttttgattggcgcatttccgccgtggcagagccttggctggggccgctgtgcggcctggtgaccggtacgctgaccggcgccaccggggtattcgtcattccggcggtgccttacctgaatgcgttgggcctggcgcgcgatgagctggtgcaggcgctggggctgtcgttcaccgtctcgacgctggcgctggccgcagggttggcctggcatcaggcgctgcccggcacgctgctcggcgtttccttgctgtcgctgttgccggcgttggccggcatgtggctgggcgggatcgtgcgccgtcattgtcgcccgcagctgtttcgccgccttttctttattgggttattaatcttgggcgttgagattatttggcgattcaattaattgaatcgatagcatctgcgtgtaatcaggttcggtatattattctgggttttattttaatatgatagcttgcaatgtttagaacacacttttcttattggttttttcatgaaatacaggatggttatggattgttattagtgtgttttactttttcaactataacccttttaaaatgggataaccccagtgaatgtataggggaaccttgatgaaggaaattttaagcagccaattcgatgcggtgtcaggtggatggcaggatcgagatgggagtggaaaaagagcgtctgataacggagatggggtatatgatgaatagatatgttgtttttataaagagtgatgaatcaaaagtgctaagaaaggaagtggttacacgagaaataattaaagacatgaagcagaaggggttcagaaagcatcatatcgaagtagaggctgataacgaaagcgatgccattaaaaaattaaataagaacagcaatgattatttggattcattgagaaatttttcaggtgatttattgttctgttctatttttgttattgttatgacgatagtctattttaccacgatgaaaatgagttagaagtagatactgtaggatttaaaaaataaaaaggcttgtcgaactggatctctctgatttttctctggatatgatactgccattgggtgaaatatacgttcataaaaatttattggcgctaggatcactcagaagatttaaaggtgtttattctaatggtttcatatcctctcaccaaaattaactgaccttctgcttattttattgtcaatacagtagcctgtgaatttgaatgttagctatcactaagggacgctgctcatgtttcgccaggaagcgatcgagaatcagaaaatgaaatggcgtggcagggcgctcctgctacccggtattcccgtttggggcacgacagggctctgcctgtttttcttcatcgcctttctcaccttcgcgatcgccggcacctatacccggcgggtcaacgtgaccggtgagatcagcacctatccccgcgccgcgaacgtttactccacggttcaaggggtagtggtcaaacaatttgtcaccgaagggcaggtgattgccgccggtgcccccatttaccagattgacgtcagtaaaagcacccgcagcggagtggtcagcgataaccagcagcgggatatcgatgaccagctggcacgcattgcgcaaatcattaaccgactggaaagcagcaagcaggccacgcttaccatgctggagaaacagaagacacaatataccgctgcgttcacccgctccaccgacatcctcaaacgcgcccaggaagggatacgcatcatgaaggagaacatggagaactaccggcactatcagaccaaggggctgatcaacaaggatcagctcaccaaccaggtggcgctgtattaccagcagcagaacaacctgctgggcctgtccggccagaatgaacagaatgcgctgcagatcaccgcgctggaaagccagatccatatccaggccgccgaatttgataaccagatctaccagatggagctgcagcgctacgagctgcaaaaggagcggcaaaacatcgatgccactggcgatattatcgttcgcgcgctggccggcggccgcatcgactcgctgagcgtcacggttggccaaatggtcaacgtcggcgacagtctgctgcagattctcccgcaaaacatcgatcgctatgccctggtgctgtgggtgcctaacgacgccatcccttacatcgctgccggtgatcaggtcaatgtgcgctatgacgcctttccggcggaaaaatttggccagtttgccggtacggtgtccgtcatctccaaagccccggcctcgccgcaggaaatgctgacctatcagggagcgcccaaagcggcgctgaccgccgccgtgccgtactacaaagtgatcgtcatgccggagaaacaggccattgcctatgacggtaaacgtctgagcctggaaaacggcatgaaagcgcaaagcaccctgtttctggaaaaaaggaagatttatcaatggatgctgtcgccgttctacgacatgaaacacagcgcgacggggccggtcaatgagtaggaccacattcaaacaacgggtcagccagctggatctgcggctgcgccaccgggttccgatggtacaccagaccgagtcgtcagaatgcgggctggcctgtctggcgatgatttgcggctactacggcaaaaacatcgacctgattgcgctgcgccggcagttcaatctgtcatcccgcggtgccacattggttgggctgaccggtatcgccgaacagctggggttgagcactcgccccttgtcactggagctggacgaacttggcgcgctaaaactgccctgcattctgcactgggaattcaaccattttgtggtgctggtcagcgtcaaaggccgccgcgcagtgctgcacgatccggcgcgcgggcggcgggcggtcagcctggcggagctgtcgcacagtttcaccggcgtagcgcttgaggcctggcccggcagcacctttaccgccgacagcgttcgccaccgcattcacctgcgcacgctgattggcagcgtacacgggctcaagggggcgctcggcaaaatcttttgcctgtctctggtattcgaaaccatcaacctggtgatgcccatcggcacgcagctggtgatggatcacgccattcctgccggagatcgcgggttactgtcgctcatctgcgccggattgatgctgtttatcttgttgcgggctgccatcggcatggtgcgggcatggtccggactggttatgtcgacgcttatcaacgtgcagtggcagtccgggttgttcacccatctgctgcgactgccgctcggttactttgaacggcgtaagctgggtgacattcagtcacgcttcggttcactggatacgctgcgcagcactttcaccaccagcatcgtcggcgccatcatggacggcatcatggtgattggcgtgctggtgatgatggtgctgtatggcggctggctgagtggggtggtgatcgcgttcaccgcgctctatgtgctgatgcgactgctgacctacggctattatcgccagctgtccgaggaggcgctggtgagagaggcgcgggcaggctcgtattttatggagacgctgtacggtatcgctaccgtcaagatgcagggcatggcagaacgccgcatcgctcactggctaaaccttgaaatcgacaccatcaacacgggtatccgcgtcacccgaatggacatgctgtttggcgggatcaacaccttcatagcggcgtgtgaccagatcgtcattctgtggttgggaaccagcctggtgatcgataaccagatgaccctcggcatgttcgtggcgttcggcgcctttcgggggcagttctccgaccgtatcgggtcgctgacggagtttttgctgcaactgcgcatgatgagcctgcataacgagcgcattgccgatatcgctctgcatccgcgggaggcgcgtaaacccgataacccttacacggcgggcctgcaacctttgggattgacgacccatgccctgagctatcgttacgacagccagtcaccggctatctttgatggcctggacatcagcgttgcgccgggcgaaagcgtggccatcgtgggcccgtccggggcaggcaagaccacgctgatgaaggtgctgtgcggactgtttaccccggattcagggcgggttgaggtgaacggcgtcgatatccgccagctcggcatcaacaactaccacaaaatgattgcctgtgtgatgcaggacgacaaactgttctccggctcgatccgggaaaatatttgcgggtttgcggacgaggtggacgatgcctggatgcaaacctgtgcccgtgccagctatctgcatgacgtgattttacgcatgcctatgggatatgaaacactgattggcgagttgggggaaggattgtccggcgggcaaaaacaacggctattcatagcccgggcaatctacaaaaaaccggctattttgtttctggatgaggccaccagcgcgctggataaggagagcgaagctgtggtgaatcaggccatcaagagactcaatatcactaagctgatcattgcccaccgtgaaacgaccattgcgtcggcagatcgggttatacatttgggataaggggggatatcacccgcggcaccggccattttcactgttcccccctaaaaacccaataaatggcgatggggcaaggctatttttgctgctcgcttcggctttcaatttacggcgcggcgcattgcgcgatattctggttttctgatgggctgacggcggatgagggaaccatgatagacagccaggcgtttgaacaacaaagcctcgacaatctgctgagctattggcggcgccatcgccgcctgccgggcgcgcgctatccggccggcccgaccgacaccctgtgtgacgtgccgggcgtcagcgtcgggcatcacacgctggccgacggcgaatgccagaccggcgttaccgccatcgtgccgccgggcgatctgtttaaccagccgctgccgtgtggtagcgcggtgatcaacggcttcgccaagccgctggggctggtgcagctgaacgagctgggggtgctgcaaacgcctattctgctgagcaacaccttcgccgtcggcacgctgttcaacgccatggtgcggcgcagctgtctgcgttacccgcagatcggccgcggcagcgccaccattaacccgctggtgctggagtgcaacgacggctacctcaacgatattcaggcgatggcggtgcgtgaggagcacgtcttcagcgcgctggataaccattccacccgctttgcgcgcggcagcgttggcgccgggcgcggcatgagcagcttcggcttgaaagggggcatcggcaccgcctcgcgctattgtcctgggctcggcaccacgctcggcgtgctggtgttggccaacttcggcaccctcgactcgctgacgctgagcggcgtgcgcgttggccaggcgctgggcaagctgttggcggatccgccgccgcaggtggacgccggttcggtcattatcatcatcgcctgcgatcgggcgctggacagccgccagctgaaccgcatcgcccgccgcgcgggcgccggtttggggcgggtgggcagccattgggggcacggctccggcgatatcgcgctggcgttttccacccggttgctgggggcgacgttgccggacgagcggctggagccgctgtttgcggccgccgcggacgccaccgaatacgcggtgttggatgccttgctgagcgcggaaggcgtcagcggtttccagcagcacgatcgtatggcgttgggcccgctgctcgatcggctggcggcaaattaaataacgggagtgtgatgtgaaagtctttatctctgcggatattgagggtattgccggcgtgatgcggccggagcagtgcaacccggctcatgctgactatgcagcggcgcgcgagctgatggagcaggaggtcaacgccgccatcgacggcgcttttgccggcggcgccaccgaggtgacggtggccgacagccacgccatgatgcagaacctgcgcgccgatcgcatcgatgcgcgggcgcgcctggtgcagggcaaaccgcgcgggctatcgatggtggaagggctgcagcatcaacgttacgacggcctgatgtgtatcggttatcacagcgccgccggcgaacgcggcgtgctggcgcataccatcaatggccgggccttttaccgcgtcagcctgaacggcgaggtggtaggcgaaagcgatctgtatgcggcggcggcggccgagttgaacgtcccgctgtggctggtgagcggtgacgacgagctgcaacgctggatcgctgaacgttatccgcaatctggctatgtttgcgtgaaacgcgccatctcgcaaaccgccgccgaatcgctcagccctcagcgggcgcgggcggagatccgcgagcgggcgatgcagcaggtgcgccagggcgccagactgccggtggagcgccgcttcatgccaccttaccggttgacgctgatggcggccaaaccggtgctggcggatctgttcagcctggtgcccggcgtgcagcgccaggacgcgctcaccgtggccttcgacagcgacaacatggcggcgcaaatccgcctgctcagcgtcttctcctctctggcgacgacgcagagctgactcccggtgcgggttcccgcccgcaccgcacgattctccaacagaaaatcccttatcaagattaggcctgctgaataataggctacgctaattattgctctgttgcgctatgtcacctgaccggcgcggcaagccattcccataacaagagttgttttgccgaaggcagtgacgccttcggtttttttggagtcatgagcaatgagcatatcccaagttccgctttcgcggcggcggtttatcgtcggcgccggggcgttggtgatcggcgcctatctgccgtccaccggcgcgctggcgcgctcgaacgccccggccgcctccggcacggcggcgttagacgccaacgccttcgttcagattggcgccgacggcgtcgtcaccgtcatcagtaaacacaccgaagtgggccagggggtctataccggcatggcgacgctggtcgccgaagagctcgacgccgactgggcgcaggtgcgggtcgtggccgcgccggtggacaccaatatctacaagaacctggcgttcggattccagggcaccggcggttccagttcggtggccaatgcctatgagcaaatgcggcgcatgggcgccatggcgcgcgcgctgctggtgcaggccgccgcgcagagctggaaaacctcggcgcaggaaatcaccgtgcaggcgggcaagatccgccatgccgccagcgggcgagaagcgggctttggcgagttcgccgcgctggccgccacgttgccgccgcccgatcccgccagcctgacgctgaaggacccggccaatttcatcctgatcggcaaaacgcgcggtttgcaccgcgtcgattcgctggcgaaaaccaacggcagcgcgcagttctcgcaggatatccacgagccggacatgctgaccgtcaccatcaagaaaccgccgcgtttcggcggcaaagtggcgaccttcgacgccgagcgggcgctggcggtgccgggcgtggtggcggtgaaacaggttgccaccggcgtggcggtttacgccaaaaacacctgggcggcgatccaggggcgggaacggctgagggtcacctgggacgatgcgcaggccgaacggcgcaacaccgaggagatctacgccgagttccgccaggtggcgcagaaaaccggcgtggtggcgaagagccacggcaagccggacgaggtgttcgataaggccgacaaggtgatcgaggctgaatacaccttcccgtacgtcgcccacgcgccgatggagccgctggacggctatctgttctgggacggcgagagcgttaaggcgcgctacggttgccaaatccagacgcttgaccataagcagctgtgcgatctgttcgagctgccgccggagaaggtgcagattgaaaccattctggcgggcggcagcttcggccggcgcatcgatttaggcaacccgacgctggggccggatctggcggccgacatggcggcggcggccaagggcatcggccccggtcacggcgtgaaggtggtatggacgcgcgaggacgacatccgcaacggctggtatcgcccgatgatcctgcaccgcctgcgcggcgccattcgcggcggcaaggtggtgggctggaccgataccgtggtcggccactcctggacgcgccacagcgcgatggatgcgctggtggtcaacgggctcgatcaaatgatggtcgagggcgccagcgaggtgtcatacaccttcgaagccttccgctgcgatgcgcacatcgtgcccggcaaggtgccgaccacctcgctgcggtcggtcgccagcacccacaccggccacgcggtggagagctttatcgatcagctgttgcaggaaaccgggcaggatccggtcgaagggcggctggcgctgatgggcgatgcgccgcgcgcggcgggcgtgctgcgggcggtggctaaagccgccgactggcagggcgccaaggtggtggacgggcgcgcgcgcggcgtgggcgtcgccaaggcgttcgatacctatgtggcgcaggtggctgaggtgtcgatcggcgaaggcggcatcccgaaagtgcataaagtgtggtgtgcggtggattgcggcgtggcggtgaaccccgacgtgatccgcgcgcagatcgagggcggcattggttacggcctcagcatggcgctatacggcaatatcacgctgaaagacggcgtggtcgaacagtccaatttcaataacttccgcccgctgcgcatcgatgagatgccggagatcgaggtgatcatcgtgccctcgaccgagaaaccgaccggcgtgggcgagctgggggtgccgaccatcgccccggcggtcggcaatgcgctggcgctgctcgggcggccgcgcacctcgctgagcctgccgctgcataatcccactgcgaatccggcgtctgacaaggagagaacctgatgattcatttaaccgtaaacgatcagccgctggcctttgagggcgatccgcacatgccgctgctgtggtttctgcgtgacgaagccggcctgaccggcaccaagttcggctgcggcatcgccatgtgcggcgcctgtaccgtgcatctggacggcgtgccggtgcgttcgtgcatgacgccggtctccgccgccgtcggcaagaaaatcaccaccatcgaagccgtgggcgccacgccggaaggcaaggcggtgcaggaagcctggcttgatctggacgtggtgcagtgcggttactgccagtccggccagatcatgagcgccagcgcgctgttggcgcaaagcaaggatccgagcgatgcggacattgacgcggcgatgggcggcaacgtctgccgctgcgccacctatgtgcgcattcgcgccgccatccaccaggccgccaaggcgttgggttagggagagatgcgatgagcaatgccttgaaagggctgttatggctgattatcgccgtggtggtgttggcgggaggatacgcgctgtacacgctgctgcggcccaccggcgctgagccggcggcgccgatcgccggggcgccggccggcatgaccgacaaactggcgcgcggcgagtacctggcgcgcgccgccgactgcgtggcgtgccacaccgcgccgggcggcgcgccttatgcgggcggcttcgccttcaaattgccgttcggcaccatttacggcaccaacatcaccgccgacaaggagaccggcatcggcaactggagcgacgatcagttcgtgcgtgcggtgcgtgagggtatcggcccgcagggcaacctgtacccggcgatgccgtacacctcgtacaccgggctgagccgcgacgacgtgctggcgatcaaggattatctgttcagcctgccgccggtgaaacaggccaacccgcaaaacgagctgtcgttcccgttcaaccagcgctggggcatgaaattctggaacctggcgttcttccatgagcagcgcttcgcgccggatctcaacaaggacgaacagtggaatcgcggcgcctatctggcgacggcgctgggccactgcggcgagtgccatacgccgcgcaatctggggttcggtcttaaccagagcaagcacctgagcggtgaagtggtgcagggctggttcgccgccaacatcacgccggacaaacagaccggcatcggcggctggagcgaccagcagctgtcgcaatatctggctaccggccatgcgccggggcgcagcagcgccgccggcccgatggcggaggcggtggaaaacagcctgcagttcctgacgccggaagataatctggcgctggtgaaatacctgcgcgacatcgagcctatcgccggcgacggcgcggcggcggtgaacctgcagccgaagggcgcgggggcttccacgccgatcctgccgggcgggcaagacagttcgcttgggcgccgggtgttcgccaacgactgcagcggttgccaccagtggaacgggccgggccgccagagcgagtacgcatcgctggtcggcagcacggcggtgaacgatccgcaggggcgcagcgtggtgcaggccatcctgaaggggacgagcatcagcgtcggcgagcggcatgagatgatgccggcgttcggcagcgcctattccgacgaggaagtggcggcggtcgccaactttgtggtcggccatttcggcgacaagcagggcaaagtcaccgccaagcaggtagcggagcagcgtaagcagtaaagaaaagcggcgagggagtttctccctcgccgtggcgtcagcggctgcgccgcgacatcacccgtttgtctttcggccgatcctgccagtcttcaacctggttattgaagttgtccgccagcaggtaggccggggttttcgccagccagtcggacaacgaaatgtcctgatagataccgttgtccatcacgatcaataccttcaaatcctcatcgccgatgttctcgatgtaatggccgaagccctgcggcacgtagccgacgtccgaaggggcgtactcttccgtctgcgcgtggccgtgcgagctgaacaccgtcattcggcctttgccggaaatatagtattgccattcgttggcattggggtgccagtgcaattcccggatcgcgccgggtttcacgatctcgatgatgccggtcatggtggtggagatggggaactctttcgacgacaccaaatggacgctgcccgcgtcattttcaaagaacggtttttgcttcattaattcataacggtgggtcagcggggcgttatttaatccgccgtcgtttttcggcaatggcaaggcgggcggaacggcgccgccgacaatataagcttcaccctgtttggccttggaaaataccgccgccggcatgttgacgcttttttccaatacctctttcggcatatgcgccacccaatcggtgatgctgaaggtgccgaattcggagaaatggccgttatcgaacgccaaaataaaatgcgcgccgtccgccaacgcctgaatggaatggccgtaaccttttgggaaataccagacgtcgccgggcccgaaatccgccacttcgcatttgccctcgggatcgagaatggtgatgcgcgcatggccctccagcataaacgcccattcggcggcgatggcatgccagtgcagttcgcgcacgccgcccggttccagcgtcatgtcgacgccggccacgccctcggagatcgggaattgctcgacggtggcttcgcgcgcccagccgctgggcaggctgcgctttttgctatcggtgaatttgtatttatagagatgctgcgcatcggcaggcggctgatagctgctggggggcacgatattgcgatggtcgtcggcagcggcatttttggcgatgccgccaatcatgccggcggcggccgcgctgacggcggagactttcaatatatcacgacgcgatagcatagcattttctccaatataaagccgtgcgcctgcagaagcaggcgacagggaaggcgcgatcgccattgaaatgattcttgtcatcggcgggaataggctgtgacccttaaatcctagcggctggaaggtattgcgtaggcgcttatttgtttgcgtttgttactaagtgagtgcaggtttaattaattaaacggaagttgaatagtcattgggtgggattaattttagtcgccggctaatttaaataaataataaacgaacgtcattttttattggccgttcgggctatttttatgactgccccacggtctccagcaccagttgccgaaagcgctcgacgatcggcgaggtcggactgcgccgtagcgccaggtaaagcggggcgctcagctgcgcttcttcggcgagagtgcggtagacgatgccgtcgccgcccagccgccgcatggaaccgggcacgatggacacccccaatccggcgccgaccaggctgagggtggccggcaggcgcggcgcttcctgcacgatgcgcgggctgaagccggcacggtggcaggcggccagaatggcgtcgtacagcccctggccggccgggcggcgatagagaataaacgcctcgtgggccagttcggccaacggcagcggctgctgcgtctcatgcgccagccgatggcccagcggcagagcgacgatcatcggctcgctgagcaccggctcgacgctcaggccgggaatgccgttggccggcgagcgcacgaaggcggcgtcgaggcgctgttccagcaacgcctccatcagttcgccgctgccggcttcttccagttgagtggtgatgcccggcaggatgtcgcggtagcggcgcagcaggttgggcacgaacgggtgcagcgcggcggaactggtgaaaccgatagcgatatgaccctgctcgccacgggcggcgcgctgcaccgcttcgcgcaggcgttcggcgcgcgccagcagggcgcgggcttcttcgaacagcacaccgcccgcttcggtgacgcgcacgccgcgcggcaatcgctgcaacaatttcacgcccaattcatcttccagcccctgcaacaggcgggtcagcggcggctgctggataaacagccgctcggcggcgcgggtgatgttgccttcttccaccacggtgacgaacgcccgcaggcgacgcagttcaatcatagccatacctcaaaggtatctttcgttgttccggaatgcattagacatcatggcacggcggcgcgcatgataccagacatcaaaacaagcgatgtggaacggcaatgtcatgtcagatatcaatacgataaaaccgcacccggcggcagcgccgggcaacgcggcgctgtttttgggctttctgtggctggggttgatcggcttcggcggcgtactgccgatggcgcgcagcatgttggtggagcgccggcgctggctgagcggcgaacagttcaccgagctgctcgggctgtgccagtttctgcccggcggcaacgtgatcaacctgtcggtggcggtgggcatggagtttcgcgggctgcgcggcgcgctgtgcgccttgttgggcctcatcagcgcgccgacggcgattgtggtggggctgggcgtggtgtacgcccgcttccaaaacgatcctcatgtgcagcatgtgttcgccggtctggccgccgccgccgccgggttgctgctctcgaccgggattaagatgctgctgccgctgcgcggcaagtgggcggcgctggcgattgtggcgctggcgctgatcgccattgcctggctgcgcctgccgctgctgccgaccatgctggtgctggcgccgctgagcattctgctgatgtggcggtggccgtcatgagcggggtgttgatggcgttggcgttgattttcaccgagctgtctctgctggcgttcggcggcggcatgaccattctgccggagatgcagcggcaggtggtggaggtgcatcagtggatgagcgcccaggagttcagcgcgctgttcgccatggcgcaggccgcgccgggaccgaacatgatgatcgtgccgctggtcggttggcacgtcgccggttgggcggggctgctggtgtcttcggtcgccaagttcgggccgtcttccatcgttacgctattggtgatgggcgcctggcggcgctttaaggatcgcccgtggcgccgcatcgtgcaggccgggctggtgccgctgaccgtggggctggtggtggccagcggccttttgatcgccgaggcttccgcgcccaattggcggctggcggcgatcgtggcgctggcgacgggattgagcatgagcaagcgcctccatccgctgtgggtgctggccggtggcgcgctgcttggcttgctgttcgcctgaaggattagcgcgggatcagcacaaagcgcgaagggccgttgcggtcgatcagctcatagcgcttcggcgcggtcagggccagaaacgccaccatactcccttcggcgtcggtcagcgtcatgccgtccggcgttggccgccaggcgaccggcagcgcgtgcagcgccagcggctgcaggcattctgctgaggcgctgaagcggaaggcgttggtattggctaccgcttcgtcgctcagctgcacctcgcagacggttttaccgtcgccgatggcggcgagctgccagtcgcccttcagcgcggcgggttccagcaacggcagtgaactgcccagggcactgctgcacaatacgctcataatgactcctgtcaggctggcgcggcgcaaggcgcgcataaggaaatgggttggcatcgggtcactcctttcggctgtccgttcacaccttagcacgttcccggcaggatgatgaggcaaggattaggttttttaatcctcgataattctgatctaaccggcgataacatgcccaaaaagacgagtcattagcccgccgatacgcttatctttctcattaatactgcgctaatacaaatcgttatgattatttccgccttaacgcccggcgcggtgatgcgcggcggcgtgggctcgcgccgtcggggttaattactatactggtcaatcctaagccttggcttagattagaacgactgatgaatagtcttacaaagcgagtggattcctactgtgtaaaaggagaatgcaatgagcagtcgccacaacgacattttgcaagatgacgatgagttcaccagcctggccgccacatcccccaacgatcacaactatcagttttactatcaccagcccggcagcccctatgacggattgggctacggcgcgctgttcacgctggacaacgctaacctgtacagcaaccagcgcggcggggcagccatcaacaacctgggtaaaatccgcgataacttcagcttcgatcgcgccgccgatcagctgacgcggccgggcctgacgcacaacggcgatcaggtgtatcaccagccggtggcgctgacctattcctttctgacgcagagcgcgctgaaccgcatcggccagaccggcgacggtgacaaggggctgcagccgctgaccctggcggcgcaggctcaggcgctgaaatcgatgcaggcctgggccgatgtggcgaacgtgacctttaccgaggcggcgtccaccgatatcaaccaccgtgcggacatcaccttcgcgtacttcacccagcgcgccgacggcagcaccgccgccggcagcggcccgaatgccatcaacgcgtacgcctattatccgccgagctccaaagcgggcagcgataacgccttcgccggcacggtgtggttcaacaaaaacttcgccacccataaggcgccggttagcggcgacttcagcagccagacctttacccacgagctgggccatgccctggggctggcgcacccgggatcttatgacgcgtcgctgggcaacccgagctaccagaacgatgccgcctattatcaggattcgttgcaatactcgatcatgagctatttcaacgccggttacaccggcgccgacaccaaaggggtgtacggctatggcccgatggtggatgacatcgccgcgatccaaaaattgtacggcgccaacatgagcacccgcaccggcgacacggtgtacggcttcaactccaacaccgggcgcgatttcctgaccgccacggcggacaacggcaaaccggtcaacttcgcggtgtgggacgctggcggcaacgacacgctggacttctccggctacagccagcagcagatgatcaacctgaacgacggcgcgttctccagcgtcggcggaggcacgcagaacgtcgccatcgcgcgcggggcgatcatcgagaacgccatcggcggcagcgggcgcgatgtgatcatcggcaacgatcaggacaacctgctggcgggcaacgccggttccgatatcctgtacggtgggctgggggcggatcatctgtggggcggcaaagacgccaacaacttcaccgactatttcgtctatctcaacgccaaagagtccacggtggcggcgttcgacgtgattgaagacttcgagcacggcatcgacaagatcgatctctccggcctgcgcttcaacaacagcctgagcgagctgcgctttatcgacagcggcagcgccttcagcggccagaaaggcgagatccaactcaacttcgacgccttcaacggcactaccgatctgttgatgaacacccagagcaacagctacgccgccgacttcaagatccacgtggtcgggcaggtggagcagagcgatattctgtttgcctgagggcgaggaaggaaaagagaaaagggccgaacggccctttttttacggctgggccgctgcgctttccaccgtgaagtcgccggtggccacctcgccggcgcggcggtagtgggccacgatcacgccgccgggcgagaccaccgattgggtcagcgtgaaggccgccggcgcggcgttgtcatcgaacagccgcttgcctgcgccgagcaacaccgggtaggtaagcaggcgcagttcgtccaccagatcgttggccagcagctgttgcatcagggtgctgctgccctgcaccagcagcaccggcccctgggcgcgcttcagctcgcgcagccgggcgatgatgtcccgccccagccactggctgttctgccacgccagcgtctcgccgtgatgagtggcgacgtatttgaccgcctgattgaacgtgcgggcgatatcggccgaaaacgggtcagcctcatcggtgatctgcggccagtaaccggcgaagatatcgtaggtgcgccgcccgagcagcaaatcaaaaggcgccgagaaaagatcgctcatcgtttccgcgacggcgtcatcccagtagggggcggtccaaccgccgaagcgaaagccgccgctgcggtcttcgtcctgcccgccgggcgcctgcatcacgccgtcgaggctgacgaacgcgctggcaataatctgtcgcatggctgtctcctgcaattgagtgccagctgaaagtttagccgccgtgcagcggccgcgccaaccggccgctcagggttgcagcgccttgagcagcgcctgatggaaacgctccggctcctccatctgcggcgcatggccgagcccggcgaactcgatcagcgtggcgtgcgggatcagtttcgccgcctgtttgcctaacacatcataatgcccgattttggccttgaccgccggcggggcgatatcgctgccgatggcggtggtgtcggcggtgccgatcatcagcgtggtgggcgtttgcagatccttgaactcgtaatacaccggctgggtgaagatcatgtcgtagatcagcgccgagttccacgccaccaggcgatggcccggcccgttgttcagcccggccagcatgtccacccagcgatcgtactccggcttccagcggccgccgtagtaagtgtgctgctcataattgcggatgctctcagcggaggtgttcagctcgcgcgcgaaccactgatcgatgctgcgccacggcacgcctttcgccttccagtcctcaaggccgatcgggttgaccatcaccagccgttccaccgcctgcggatacatcaggctgtagcgcgtggccagcatgccgccggtggagtggccgatgacgatggccttgctgatgttcagattctgcagcaggccgtgggtattttgcgccagctgctggaagctgtactggtaatgcgccggcttggtggaggagcaaaagccgatttgatcgggcgcgatgacgcggtaaccggccttgctcagcgccttgatggtgtcctgccaggtggcggcgcagaagtttttaccgtgcagcaacagcgcggtgcggccgttggcggtgccttccggcggcacgtccatatagcccatttttaacggctgcccctgcgaggtgaagctgaactgttgcaacgggtaggggtagtgaaagccctgcagctccgggccgaacgttggcgtttcggcggcaccggcggcgaacgcggccagcgcggcgcacagcagcgcgctacgggtgaatctcagcatcctgatctcctgaaaaacggacgaaagccgagtatagccataatcggcgcggcggcgcgccagtggattcagataattctgtaatatgacggtttgattcccggccagattccggcaccgctcttttgcacagtgaacgcggtcacgccgcgcaacattcgccgtatctgatggttttatttcaaggctaagttatgcgatgcttaagcattatttatgcaaaaggatcctcgcatgtccgctttatcccgctgcgctttcagcgaaggcagcgtcgctttgccggaaggctatgccgatcgcacggtcaacgtcctgttggccggcgatgatgtttccccctcagtcaatatttcccgcgatgcgctgcagccggcggagagcctggaaagctacgtcacccgccagcttgatgcgctggcgcaggggctgaaaggttgggcgttcaaaagccgcgagccggcgtcgttgggcgatgggctggccgccggtgagtgggtacgcgccagctacctgcgcgacggcaaacgcatctggcagaaccaggcggtgttcgcgctggcggagggccgggtgctggtgttcaccctggcgatggcgcgcaagctgacgccgcaagacgacgcgctgctgcagcaggtgctgagcagctaccgggcggcataacgatgaactctttgcgtaaaaggaacttacgatgaccgaagcggcccgcgtcggcgataccatcgggcactcccatgccctggccggcatgattgccggcaccattgtcggcggcctgatcgccgccgcaggcgcattggcagcgggggcgctgttcgtcgccggcctggcggcttcctgtatcggcgtcggcgtgctgctcatcggcgccagcctggcggtggggtatctcaccggggaggcggccaccgcggcgcgtgacggcattgccgacgccggtgccggtagcctgacccccaaaggcaatatcgtcaccggctcccccaacgtcttcatcaacggcaaacccgccgcgctcgccaccaacagccaggtggcctgcagcgacgacggcccgagcatgcagatggcgcagggctccgacaaggtcagcatcaacggccagcccgcctcgcgcgtgggggacaaaaccaactgcgacgcgcaggtgatggaaggttcgcccaacgtgtttatcggcggcggcaccgtcaccaccttgccgatcaagcccgaagtgccggattggctgtacaaggtctctgacctgacgctgctgttcgccggcctggtgggcggcgtgggcggcgccgccggcaagctgggggcgctcggcaaactgctgggcaagctgcccggcatcaacaaactggcgcgcatcgcctgccgcgccggcaccctgatgaccgccaccgccgcggtcggcattatcgcccggccggtggatatcgtcagcggccagaaattcctcgacggcgaagacgatctcgatttcgtgctgccttcgcgcctgccggtcgcctggcagcgctattggcgcagcggcaaccccggcgacagcgtactgggccgcggctggaacctgttttgggagagtagcctgcagccgtatcaggacggcctggtgtggcgtgcgccttccggcgacttcgtcgctttccctatggtgccgcgcggccacaaaacctactgcgaagccgaaaaatgctggctgatgcacaacgacgacggcagctggcagctgtttgacgtcggcgaacagattttccactacccgccgctggcgggcgaccagccgagccggctcagcatgatcaccgacgccatcggcaacgccacctcgctgttctacgacgacgaggggctgctgagcgaactggtggacagcgccgggcagcgcctgatgtgccgctatgcacagggccgtctgcgcgaagtggcgctgcaaaccgccgacggtgaacgaacgctggcgcgttatggttacgatgagcagggccagctgacgacggtgagcaaccgcgccggtgaggtgacgcggcgctttggctggcgcgacggcctgatgatcagccaccaggacgccgccgggctgctgaacgaataccaatggcaagagatcgacggcgtgccgcgcgtgacggcctaccgcaacagcgccggggaatcccttgagttcggttacgacttcgccggcgggcgccgcagcgcggtgcgcggcgacggcaaacgggcggagtggcggctggatgacgacgacaacgtggcgcagtacaccgatttcgaccagcgccgctacggttttatctaccaacgcggcgagctgtgcagcgtgctgctgcccggcggcgcgcagcgccagagcgaatgggatccctacggccgcctgctgtcggagaccgatccgctcggccgcgtgacgcgctatcaatattcgcgcaacagcggccggctgttcgccgtcgcctacccggacggcagcagtgaggcgcagcattgggacacgctggggcgcccgacgcgctatgtcgatgcgctgggcaatgccacgctgtaccgttatccggatgacgaagagagcctgcccgctagtatgatcgacgcgctgggcggggaagtgaagctggagtgggacgcccgcggccagctgacgcgctacaccgactgttccggcagcgtgacggcttatacctacgatgcgctggggcaactgacggcgcagaccgatgccgaaggccatcagacgcgctacttgtgggataacggcggccgcctgcataccctgatccacccggacggcggcgaagagcgctttaactggaatgcgcacggccagctggccgagcatcaggacgcgttgggcagcctgacccgctggcagtacaacgccctggggctgccggtcagcatcaccgatcgcatcaaccgcacccggcgctatcactacagcccgcagggctggctgacacggctggagaacggcaacggcggcgaataccgcttcagctacgatgcggtgggccgcgtgctgaccgaagagcgcccggacgacacccgccacgattatcgctacggcgcggccgggctgctggaggagcaccgcgaggtcggcctgccgggcagcgcaggtgagctgacgcagcgcgaacagcgcttccgcttcgacgaggcggggcagctggtctggcgcggcaacgccagcgcggaatggcattaccgtttcgacgccatggggcggctgcgcgagctgaaccgcctgccgacggcgagcggcgcggcgctgggcatcgagccggacagcgtgcagatgcgctatgacgccgccgggcggctgctcggcgaacagggcgtgaacggcgagctgcaataccagtgggatgcgctggccaacctgcaggcgctgacgctgccgcagggcgatcgcctgcagtggctgtattacggctccggccacgccagcgccatcaaattcaaccagcaggtggtgagcgagttcacccgcgatcgcctgcaccgggaaaccggccgtagccagggcgcgctgcagcagcagcggcgttacgacgccatgggccgccgcagctggcagagcagcgccttcggccacgataaactgacccggccggaagacggcgtgctgtggcgcgcctatcgctacaccggccgcggcgagctggccggggtgagcgacgcgctgcgcggcgaagtgcactatggttacgacgccgaaggccgcctgctgcaacaccgcgaacccaatcagggcaaaccgggcgcacggctggtgtacgatctggcggataacctgctgggcgaacgcagcccgcagagcgacatcgacgcgcacctgccgctggcgccgatcgccgacaaccgcctgacgcactggcaaaaactgttttaccgttacgacgcctggggcaacctgatcagccggcgcaacggcctgtacgaacagcactaccgctacgacgccgacaaccggctggtgcaggcgcacggccgcggcccgcagggtgagttcgaggcgcagtatcattacgacgcgctgggccgccgcagccgcaaaacggtgcgctataagggcaaaaccgaacagacgacccgtttcctgtggcagggctaccggttgctgcaggagcagcgcgacgacggcagccgccgcagctggagctacgatccggccagcccgtggagcccactggcggcgctggagcaggcgggcgacagccgctcggcggatatttactggtatcacaccgatctgaacagcgcgccgctggaagtgaccgacgcagcgggcaacctgtgctggtccgggcagtacgacaccttcggcaagctgcagggccagacggtagccggcgcggcgaagcggcagggcgtgcaataccagcagccgctgcgctacgccgggcaatatcaggacgacgaaagcggcctgcactacaacctgttccgctactacgaacccgaggtggggcgtttcaccacgcaggatccgatagggctacgcggcgggttgaacctttatagatatgctccaaatcctttgggatggatagatcctctaggacttagtggcttaaatagccttcagcaacaaattgatgagattctattggaacatcttcctgctatacagaagatagatccaaacgcaaccgttggatatagaggtagtgctgcaagtggaataagtaagtcccatgatcctgcgattgctagacctattaacatgaatgatttcgatgttgatggatttattaagtcggattacttagctagttcacctgagtttaggaacagacgccgggacgcatctaagcttggggggatgaaatcaatagaggagtctatcgattcgaagttaaggcagaaattcccagggttaagaaatgaaccatttgggtttagggtgttctacacccatgagttagatgatctggctagaaaaggcgacgtccaaagaaggttagggcgttccggatgttcatgaaatggagaatggctgtgaacgagaataggcaattaggtattttattattggaagacattccatttgataagctgcttattaagctggaaagggcgtttggtgtttcacttccttgtgaagatgataaggggcgctatgtggcaaaagcagaactagatgattataatatagaggttatagatagagttgatagattaggggatgttctttgtgatgataatcatgtgatcgacgtgaaaataaaatctaatgatttttttaatccagactttgagagaaaaataaaaaaaatactaagagatggagatgtgaagtggaaggatggaatttggactaagcttcatagggatgaggattatagagtcgtctatcctgactcttagtgttcacgttaacaatgtaaccatttctaaatctgcgttagagccgacaattctcagtcggttctaaatatctagagtaaaaaagtatctaaaagcaggtttgataattttgaaatatccatccataaacattgataaatcattttatattacggtatctaacatgattgattttaacgctaggattgtgtctggtgtttccatagggaatgtcgttctaaatgaaaatatttcattatatattaatgagatgcaatccagatttagcgttaagattaaaaatcactccctacctgacgggagtgagcgaaagtcatatacagtcgataataccttatccgtcataactgataaagacggtgtcattttgtcacttggatgtaatgctcattaccaagggggctacaatggaatcatattccccggaatggaaataacagatataatcaagctgacgatatcacagaaaatatacaatagttcaatagttattaatgatgactttggtatttcgtttatcctcccatgcccatatgatgagattgccgatgcgataaacgatattcctggcggggtgataataaacgaaattttcgtatctgatttttcattctggcgttagcttatggaacatatgagtgaatttagtgagaatataattaaatatggggtggtgatataattgttactggctacatagattcggatacaccaccgttttttcatccgatgtatgacagggtttactttatatccggtgaggttatatttgaattttacattgatgatgatggggttgttaattcacatttagttgaaaacatctctccgtggtttgaagtagatgtggatgatcaattttacatgatgtcaatctattcacaagcttttaaaactgaacgggaagttaaaataattgcagtgaattatagtgaagaaccgttctcagtgttcatcgtcaggtataaagatggtgacaatgaaaattcactgtattcaatgaaaattcactgtatttagagccaaagagttttttgactttttgatttcatagaaaaaaccatggaatgattaggagttcaatgtgagcaaggaattaaagcttgatgttatgaataacaaaaatgacttgattgaagggactttttgctactcgctttttgagaggtcgttctttgatgaaaatctgttaagtgacttaataaataattcaggggcgtttttaaaagaaaacgaatgtgataaggatgttttaaatttgctatcatgggttgtcaatggtgttgatcagtgttttacttcccatagtgatgaaaatgactattatttaattgaaaactactctgtggcattggaaaataggtgggtgcttttttggcggtcaaaaattgataaaataattggcgggaagtaaaatggatatcaagaaaatacaagagaaatgggtgcgtggttagttaattggagtggacctcattgcaagtgaaaacaatacagcaagagagataaatatttactctgaagaaagtgatggtttcaaaaatacttttaataaggagtatggcatttcatatgggagtgttatttcgttaagctcactcattaagaaacgtgatgatttgtggtctgaaattcaaataaacaacaaggtattgcttcctgatggtgacgttttattttgcggggagggcgaaatggggagtgatggttttattgtcagagcagataagtataataaattgaaatggttcatgtactctacgacctctaacccatttcttgatgttataaggttaaacggtcggctgcatataaaatccacgttgggtttttatcttgacttcggtatcgctgacaatgatatttttctgagaaataaatgagtgatatttttctaattgacatcattagtattaagcctaataataaatgaatttttaatttgatggaggttaccaatgattaacaaatctagtctggttgatggtatcctttttcgggatgagaatgactcgaatgaaactgtagttttcaatttttatacttgggtggaaatgctcaaagcgatcattgttaaatatgcgcaaaagtctgaaagtgacgcggagttattggttttatcatcgagcttagtgtgcaagcctatcaacagttatacggctgtctgtctcaggagccatgaaattgaatatcattgggcaatgctgatagcttatggtgaacagtattggctgaaaggcgtagaatccaaacagcctgatggctactttgactgggatgtgcaacataggaaagaacataacttagcagaggaaagctttgtttttagcaattcatgaatcgcgacccgatagggtcaaacatccctccaaatgtccaacgccttccttatcctacatcccccaaactaaatacccaccgtgccattaatcagggtgcggcactgcccgccgatccagggttcgccgtcaataaagcgcacgctcacgcggccatcacgattaagttgggtgccctggcgcacctggtagccctgcgcggtccggccgccgtcggggaagcggctggcctgcagcaagcgcgccaggctggcattggcgctgccggttaccggatcttcaatcaaaacaccgcattccaccataaacgcgcgcatttcgtaatcggccggttcggccgcagaacaggcgccataaatcactacgccatccacatcacaggcggtttgcagctgtttaatcgtggcctgatccggcgttaccgccaggcaggactgcgcgtccggcaggcgcaccatcagccagcgaatgcccatctcggcaatcaccggcagagggcttgctgcaatcactgcaggccgtaaagcggccgttaaccgttcggtttcttcggccgccattgggcggaactctacttcgggcgcggcgaacgccaatgtgccttccggcaggatattgaccgccaccagaccgacgccgcattcctgcatcaccgttccagggcgtttaggcgtcaatccggctttcagcaaggcgtgggcggtgcccagcgtcgggtggccggcgaagggcagctctttttcggtggtgaaaatgcgcaccttataatccgccgccgggtgcgtcggtttaagcacaaaggtggtttccgacagattggtccaacgggccaatgccagcatctgcgcgtcgttcagcccttcggcttccagcaccaccgccacgggattgccctgcagcggcgtacgggtaaacacgtccacctgttggtaggcgcggggtgtcacatcatcacttctgagcatttgccatcatccgttatcaacaaaacctgatgataacgatatttgcaatagcttcaaaaggttgagttttgttttgagatgcccgcccgtcgccacttcatccccggcttggcgaacatcaccaggttgcccaacaggatcaggcacaggcccagcacggcgttgaaatgccactggtagccttcgtaaatcgttgagatggtcagcgccaccagcgggaacagcagggtgctgtaggccgccgcgccggcgccgatgcggccgagcaggctgaagtaggcggcgaaggcgatcaccgatccgaagatcgccagatacaacagggatccgatatagcggctgctgtattccatctggaacgatgcgccctgcgccagggcgatcagcgccattaacagcgcaccgtaggtcatggcataggtattggtggaaaaaatatccagcccgcggcgctgatggcgcgcgctgatcatattgcccagcgagaagccgtaggtgccgagcgcgctcaggccgatgcctttaagcagctccggcgccatgcgggtggcggccagatcttgccagaacagcgccacgatgccggtcaaccccagcagcgccgccggcagcagattggggctggggcgctggcggaagagcagcaggctgttgagggcgttgaacagcaccgccatcgagaagatcaccgattccagcccgctgctgatataagccgccgcatggtagaagcagaagaagttgaaaccgaacacgcagcagccctgcagcacgcagaacagatgatcgcgcggggcgatgcggcgcaggcggcgcgttagcaacagcgcggcgaacatcaccgcggcggaaatggcgaaacggtaagcgatcgacacgggaatggccaccgggccttcctgttgcagggtaatcgctatccaggtggtgccccaaatcagcaccacggcgaggtacaacagcgcattcatgttctttactccgaaaaaaccgatagcgcagtatccgctttgtcgcgcggcggcgcttgcagcgctttgcgcccagttgcatattcttgcgctttttttgccaaaagcgcggggcggccgctggcatgccgcggcgccactctttacactgtcagcatgtcgaacaacggggccggcgatgtccaactatcaggcgtttgaaacactgcgtgagcacaaggcgcggctgcacggcagcgtgctgctgggcaccggcgtggagctggcggcctggtccaactgcaacgatcgcgtcacgcaggaaaacgccgaccaccataccctgagcctgtacgtcgccgacggctatgagtgctaccagcaggtgccgggcggctggcgcaacggcggcgggccggatcgcttctgcatcatgccgcgccagtacgcttccacctgggatgtgcgcagcgatctgtcgttcgtgcatctgtattgcaccgacgggcatctgcgccggctggcggagcaaacctgggatcgcagcccggcggcgatcaacgtggagccgcgcagcttcggcgaagatccgcagatcacgctgctgtatcgtcagtttttgctcaactgcgactggcgggacagcgccaacctgctggcgctcagcagcgcctcgaacctgttgatgtcgcacctgatccagcgctacagccagctgcagtggaagctgccggcggcgcgcggcggcctggctcccgcggtagccaggcgggtgcgggaatatatcgcaagccaccttgatcggcctttgttgttggccgatctggcggcgcaggccgggttgagcgaataccattttgcccgcatgttcaaacattcgaccggcctggcgccgcaccagtttgtgatgcgcgcgcggctgcagcgggcggaacagctgttgcggcacagccaacagccgatcaccgagattgcgctggcgtgcggcttcagctccgccagccatttcagcaaccgctttaaggcggcctatggatttgctccgctgcaggtgcggcaggggcgctaaccggaagggagtgcaagcatggatcaaccatttgccgggctgggcgtgttgttcgtcgccggatgcgggccgatcacgcgtgagagcgacgagagcaaggcgttttatgtcgaggcgctggggttgccgctcaagccgatgccgggcaacgaaacctatctgctggccgagcagggcgcgctggacggggtgaagcacttcgccctatggccgctggcgcaggcggcgcagtcctgctttggcgacgatcgctggccggcggatctcgcggtgccgcaggcatggatcgagttcgacgtggccgacatggcggccgccacccaggggctggtcgatcgcggttatcggctgctggtcgccaatcgtgaagagccgtgggggcaaagcgttacccgtttgctcagcccggaagggttgctggttggcgtcacctatacgccctggctgcgttaaacgccacgccgttcgccgccgtttccctgcggcgggcggcttaagaataaatacgcattagcttaaagcgatctgcgctatagacccatcaaatccccgagtggtttcccttcctgaaagcagtaattccgttcattgcgtaaaaaccaatggccagaacgcgctattgccatgccattttacggcgatttttcgcccgcttttttcgccgccaggtgcctgataggaatagagattattcttatatttccgccaaccgttaagaaataataatgattctcgttttcaaccacggaaaggagaaggaacgatgaaaacagtgaaacgaacgggcatcgcgctggcgatagccctgactttccccctggcattgcctgccgctttggcggcgcaaaccaccctgacaaacagtaaggcggcgacgatgacggaaaaacacgggcagtttattgcggtcggtaaagtggtgcaggtgaccttcggcgatttcgccttcaagctggattttaccgatgacaagaccatgaccttcaccggtatcggcgaagcgtcgcagggcatcaccgataccgtgcagtacaccgcggtggagattcggccgaaggtctacatggtctattggcatgaaccgcagtccggcgacaacgtgacgcatgtcgaggactttgagcgcggcgaggtgtacaccaacatcgccgccagggacggcagcttcacccatctgaaagggcagctgaaaatcgtaggtcactcaggaaactaaggagcagttatgaaaaaggtattgatcacctgtgcgatcgtcggcggtttgctggcgagttacccggcgctgtcaacggatcaggcggcgtcttacaaatcggccggcaagggcggttatcatcatgcccagcagaagctgaaggtggtggaagatctgtatgcaggctttttcaaccgtcatgacatcagcgtggcgcaaaagctgattgtggagaactacaagcagcataacccgttcgtcggcgacggcatcaagccgttcctggatttcttcagccagaccttcaaagacaatccgcagtacagcgccaaaatataccgcagcgcggtcaacggcgatctggtctacgttcacgtccaataccaaaataacccgcaggatcgcggcaccgccagcgtggatatttatcgggtgaacgatcagggtaaaatcaccgagcattgggacgtcaatcaggatgtgccggaaaaatcggccaacgacaataccatgttctgatccaaaagggccgctgcggcggccctccacacgcccgcaacactttatttacttacataaataccaaacgttcatcgtgtcgagtaggctacggccgcctttggcagtggtggtacggttgatgggcgtcattgtcccgccactgcttgaggcgtttccccacattcctcgttatcccgcgcgtttattttccacttttttgaactgatgccgcagctgcagcgcattgcaaagcaccaataccgccgtgacggcgaacacccagcggaaccccatcatcgccgaaatgcccgatcccagcagcgggccaaccacgttgcccaggtacataaaggattggttatagccgaagatgcgcccggtcacctgatcggaggaatacttcagcagcagcgcctgcaccgccggcatcagcgcgccgtcggcgaaccccagcaggaagcgcagaatgcccagctgcagcggcgtattcacccaggccatcacggcgaacaggccggtggtgaacagcagcgcggcgatcaggatgcgcgcggtgccgatgcgatcgccgagccgcccgaggcgtggcgccgagatcagcgccgcaatgccgggcacggcggcaatcatgccgctaacaaaggcgatattgctgacgtcgcccgacagttcgcggatgaacagcgtcaggatcgggctgatggaggagttagccagctggatcatcagggtacaaacgaacagcgtgacgatcagcgtcggataaggcagcgaacggaataccgccttgccgcttagctgatccgcttttttcaccgtgatgcgccgttctttaatcaggaacagcgtcaccaggaagctgacgaacatcagcccggcggtgacgaaaaacaccacccgcagccccagatggtcggccatcagcccgcccagcagcggcccggcgatcacgccggagatctgcccggtagagagcgtgcccagcgcccagccgcttttatcgcgcggcgcctgcgaggcgaccagcgccatggcgttgggaatatagccggacgtcagccccatcagggcgcgcagcgcgaacagctgccagacgttggtggccagcccctgcagggcgatgacgatcgccatacccagcgaagcgcgcagcagcatcagcttgcggcctttgcggtcggcgaggctgccccacagcggcgacaccaccgccgagaccaaaaaggtgccgctgaacaccagcccggaccacaggctgagggactgatgatcgctgacgccgagctgttcgacgtacagcggcagaaaagggaggatttggctcatcgccagcccggtgaagaaacacccgagccagaccgagatcagattgactttccacgcttccatcgacttgtcgtaccactttgaatttggagggatttgttaagcaagataataataacaccgcgaactggccggcgcgggggaaatgcgtgagaaaacgtaaagctcgtcggcggcgttgttacatttcgctataaattaatagctatattatcataggtatttattttaagctactccaccaagccgctcaacaattcggcggcgccacactctctctacccatttcgccgtgtcggcggcaaggagacgctttctatgaataccgcactgatcgctctggattacatcgtggatatctcccacccggaaggaaaaattgcgcgctcggcgcagcaggtcattgagcgcgatgctatcgcgcgggcaaatagcgcattgtctctcgcgcagcgcaaggattggctgcgcatattggttaaagtcggtttcgcgaccggctatgtcgatcaacccaaatactcgcggatgtttgggcaggcgcatcaatttggcgctatcgcactgggccagccgggcacggattttcatcctgatttagcgtctgatttgggggagttaaccatcgtaaaaccgcgcgtcagcgcgttttatggcaccaatctggatgcgacgctgcgcgcccgccgcattgaacggttggtgatctgtggagtcagcagcacctgggcggtacaggcgacggcgcgcgacgcgcacgatcgcgattatcaggtgctgatactggaagaggcttgcgcggcggccacggcggaagagcaccggatctcgatggaaacgcttgccactattgccgatatcgtcacgctggaacagctgagcgcattgtgaagctgctgcgtgaagaaatcgcctggtgtcagctgcgacggggagcatgggtgttggcgccgttgctggccctgagcctggcgacaggcaatgccaactggctgaaggcttcggtggtcaccatatcgctgtttgtcgtttgtgagcgccttgaactggcgccgctcggcgtggcgctgcatgcggcggcattgctgctgctctttatggcgctgctgtgcgccatgcacacgccggtcatcttcattttggcgtgcgtgttggcagcggcggcggcggttgggatctccgcgttcggcggcaagctgcgatccctggggaattttatttttattccggctctttatctggcgtgtgaaaccgctgaaggtggcgccggcgcgccattagcccaatgcggctgggcgcagctcccttttctgggggcagccgtcttgccggtgctgatgcttgcactggcagagcatcggcggctagcgcggctgtcgacgagtgacagcctgcatcattatctccagctgcgccgcagcgatgagcttggcgctcgcgtggcctgcggcgaggctttgctcgccgtaagttgtgccgttgcactgtcggcggcgatcgttgagtggcaacacctcgattacgggcaatgggtgatctggtcggccgtcagcgtgatcagcggcgatatggccgctacgcgcaacaaactccgccagcgtgcgtcaggcgcattgctgggcgtgcccgtcggtattttgctgggtagcctcatgccgcatggcaatgtgggttatgaactgctgagcgtggtgacgatgctcaccctggtgtcttttcatcgttataccttggggtttggcgcccgttgcgcctgcatcgcctgcgcgttggtgattgcaggaaaagcgccgtcgatcgccgcagaaagggtggtcaatgtgttgctgggcggtggcatcggtctgctgttcgctttggcggtgcatgcggtgttgccgctcaacgccggcacccgccaatagcgagctggcatatttcgtccgccaatttcggttgaccgtttccggtctcggtgtgaaagtacggacaaatctatcgttatctattgatgccaatgaaaaaagatcatcctgaagacgtgacgctgctgcgcacgcaattaatgtcgctggtgcgccgtttgcggcgcgagtcgcgcagcgacgaaaaatcctgggcccagctgatgctgctgggagctatcgatcgtcacggcggcgaggcgacgccgtcgctgctggcggagtcggagcgcatgcgttcctctaacctggcggccgccttacgggagctggaggccgatgggctgctggtgcgcacgccggatgctgaagacaaacgccgggtgcgggtgcgcctgacgcccgccgggctggggctgctgcagcaaagccgcacccggcgcgaggcgtggctgctggcggcgatggaaagctgtttaacggagcaagaacaggcgcagctgatcgaagcgggggcgttgatggcgcggctggcggcggcgccgtcaacggacgcggaataatcggcggggcggcagatgcgccgcccgtgcagcgaggttacggcattggccaatcggccggcatggtgctgacgacgtccacgtagcgatcccaggccgatgaccagaattgggtgaaggcttccagggtgaggtggatgcccatcaggcccatcacgaaccagcaggcggtaaacaggcccaggctgctgaacatgaacgccatgccgttgcggctggttttacggcaaacgacgtttaactggctggcgaagaacatcatcacggcgctcagcaactcccagcgcatcatgactaaaccggtggcaatggtactcatcgaactcgatcctatgtaacaaaaagccgcatccggcagggcgccgacagggaaatgcgggggaataacgggaataatgtgattcagatcacattgtagcattggggcgaacgacggctcaatggggcgcgcggtgaaaaaaacgccgacggtaacattccaatatgctgaaacagttatgccatttcattagcaaccttttcatggggcggcgcgctcgataacgctatgcttgccggcttttcagttccctgattttacggggaaatgtgacgcaaaaggtaccggcaccgcatggccctgttaaaagaaaaaattcgcgaccactctgcggaagagaggctgtttatccgccgggcaggcgtagcgctggcgctggtggtggtctgcttcggcgcgctgatcgttaacctctaccggctgcaaatccgccagcacggcttttaccagacgcgttccaaccagaacgacatcaagatgctgccgctcgcccccagccgcgggttaatcttcgatcgcaatggcactccgctggtgcgaaacgtgacactgtatcgtgtcgaaatcacgcccagcaaaatcaccgacatggcggcgctgctgcaggcgctgacgccgatcgtcgatctgacgccggaagacatcagcgcgtttcgcgacgatatgcaccacaacagccgctacaagccggtgacgctaaaaaccgggctgagtgacactgaggtggcgcgctttgccgtcaatcaataccgtttcgacggggtgaccatcgatacctatcagcagcgtgaatatccttacggcgcccagctggcgcacgtgctgggctatgtgtcgaagatcaacgacagcgatctcaagcgcctggacaaggccggcctgagcgagaactatgccgccgaccgcaacatcggcaaacagggcatcgaagcctattatgagtcagaactgcacggcaccaccggctatcaggaggtggaggtggataaccatgggcgggtgatccgcttgctgaaggagcagccgccgaaggccggcaaaaacatttacctgacgctggatctgccgctgcagcagtacatcgaatcggtgctgaaggggcaacgcgccgcggtggtggtggaagatccgcgcgacggcggcattctggcgatggtctccagccccagttacgatcccaatcccttcgtcaaaggcatcggctatcaggcctataaggcgctgctgggcaacccggatctgccgctcatcaaccgcgttacccagggattgtacccgccggcttccacggtgaagccctacatggccgtttcggcgctgttcgccggggtgatcacgcccgccaccacctttttcggcgcgccgacctggacgctgcccggcaccgagcggcgctaccgcgactggctgaaaaccggccacggcatgctcaacgtcaccaaagcgattgaagagtccgccgacaccttcttttatcaggtggcctatgagatgggcatcgatcgcattcaccactggctgagccagttcggttacggccagtcgaccggcatcgatctgaacgaagagtaccgcggcgtgctgccgagccgcgactggaagctgaaggtgcacaaaaagggctggtatcagggggatacggtctcggtgggcatcggccaggggtattgggtggcgacgccgatccagatggtgaaagccttgagcacgctgctcaacaacggccgggtgaaaacgccgcatctgttatattcgctgcagcagggcaaccgggtgacgcgctaccagtcgccggcgcaaacggcgcagatcggcgatcccaactcgccttactggggcatcgtgcgcaacggcatgtacggcatggccaacttgccgaacggcaccggttacaagctgttccacaccgcgccgtatcagatcgccgccaaatccggcacctcgcaagtgttcagcctgaagcaaaaccagacttacaacgccaaaatgatcccggtgcggctgcgcgatcacatcttttatacgctgtttgcgccctacaaaaatccccgggtggcgatggcgctgatcctggaaaacggcggcggcgacggcgtggtggcggggccgaccgcgcgcgcgatcctcgaccacatttttgacccggccaatgcgccacagcccggcgatacgccgcaaagtaaaccgcagttaaacgacagcgcggatgtgcaacggtgatgcggtttgtttttactttcttacaaactgcaatctcctgaccatttccggcaaggtagactgaaataacaccataaactgaataaaaacgtagggttaacacaacagtggcgccatcgaccaaaaagagcggtaaaacctattccacagttcgtttcggctggatttgcgccggcatgctggtctgtttttttctgttggcgttcagggtcggctacctgcaactgctggaacaccagcagttggccaatcaggctgaccaacgttcgatccgcacccaggtggtgccgaccaaccgcgccatgatcaccgatcgcaacgatgaggcgctggcggtcagcgtgtcgtccaaagacatcgtgctggatccgaagcatattctcgatacccagaccgataccggcaacgaacgctggcagagcatggccaacgtgctgaagatcccgctggcggacatccagcacctgatccagagcaacgcgcgcaaacgttttgtctacctcgctcgcaaggtagaggacgataacgccgcctacatcagcaaactgcatctgaccggcgtcagcaccgagcaggatttcagccgcttttatccgatgggccaggacgccgccgggctgatcggcatcgtcggccaggacaatcaggggctggagggcattgagctgggtttcaacccgctgttgcagggcaaaaacggcctgcgggtctatcagaaggacggcagcggcgcggtgatcggcgtgcttaaaagcgtggatccggtgccgccgccgaacgtgacgctcagcatcgataaatttattcagtacgtgctctatgcgcagatccgcgacggcgtggtggctaaccaggccgactccggctgtgcggtgctggtcaagatcgacaccggcgaggtcctcggcatggccagctacccgtcgttcaacccgaacaactatggcagcaccccggcgaaggatattcgcaacgtgtgcagcagcgacagcttcgaaccgggctcgacggtgaaaccggtggtggtaatggtggggctggagcataagctgatccggccggatacggtgctggacaccacgccgtatcgggtgaacggtcacctgatcaaagacgtcggccattggtcgaaactgaccatcaccggcgtgctgcaaaaatcgagcgacatcgcggtatcgcacattgcgctggcgctgccggccacggtgctgccggcggtctaccgcagctttggcctggggcgaccgaccgagctcggcatcggcaacgagagcagcggctacttgccgcagcatcgcgaacgctgggccgatatcgaacgcgctaccttctccttcggctatgggctgcgcgtgacgccgctgcagatggcgcgcgagtatgccgcgatcggttccttcggcatttatcggccgctgtcgatcaccaaggtgacgccgccggtgatggggcaacgtattctgccggcggatacggttcgggccgtggtgcatatgatggagagcgacgccttgccgggcggcagcggggtgagcgccgcagtgccgggctaccggctggcgatcaaaaccggtaccgccgagaaaatgggcccgagcggcaaatacgacggcggctacatcaactacaccgccggcgtggcgccggccagcgatccgcaggtggcgctggtggtgatggtcaacaacccgaaagccggcaagcacttcggcggttcggtggccgggccggtgttcggcaagatcatggcccaggtgctggagcacatgaatattctgccggatgcccagccgcttaacgtggtgtcgtcggtcaaggggtaagggggattagcgcgattccagcaggcgcttcagcgcctgcagatcggcgttcaccagcccgacgtcgcgggcgaacagcgcgtcgtccatgtccggctggcggaacagggtgaagatcacctcggtgccttgtcggttggcgagcgcgcgcagcggcacgtagactacgccgccgtccggcagcgtcacccaatgatccagcacgccgaaggcattgggcgcgctaaatcgaatgcggatccgcccctgcggggtctccgccatccaatcttcaccttcccgccgtaagctattggctaatcctttggcccacaacgggaagttttccgggcggctgagaaaggcgtacacctcgtcacaggggcggttgatggcgacatgcagcgtttgcgcgctcagcatcatgatttctccggttgacggcgatacttcagtgtagatcccgccgcgctcagaagtagtaaccgatgtttacgttggtgcgaaaataccatttattgctgccggaggactgggtgccggtccagccggtggcgttttccacgccgccccacggattggcgttctgcgcccaggtcagatccacccacagcatcaccggcatggcgaacacctgcaccccgagcgtattcattttggagtcggagccgccgtgcctgtccttccagagcacgctgtagtcgttgtagaagcgcagctttttcaccggtccccagggcacctcgacgtcgcgcgccaggttgatggcggcagtggtggcctgcgacgggatcagataggccggcgtcaggccgttgccgcccatcaggatcaccgaattgctggcgccggccgggcctttggcgtcgtaaccgtagcggatcacctggccggacagatgccaggcatcccgattcaccagcgtatgcaggcccgccgcccagaagctgccgttatcaccggtcgcctggttgtagagccgcgaggccgccagcgaaccgccgagctcattgtcccaaccgccctggtggaaagcccgcgtcagccgcaggtttacctgatcgcgtttttcgttgcgctgcagatgctgtgaggcaaagttggtgttcttcagatcgtcgtagctggcgacgtcgggggcgtaacgcacgccggtcggcatcatgcgcgggtagtaggcggcgtcaaaggcccaatcgccccgttggtattggtatttggcgccgagcccggtgttgacgccaaagccgaggtaaaacggaatgccgtacgaccagccgaactgcggatagggcatcaggccgaacggtttgaacggcgcgcccagctgcacggtggagcgctcagacaggtggtagccgacataggcgcggtcgatggcgtatttgcgccgatcctgaaaccagaatccgctatcgaaaaacgcgtcgtttatctggccggcggcatcgatgcgaaaggcgtcaaagcgtaaatgcggcggatgccgataattgctgctgcgccagtcttcatagcgataattggcgcgcagcgcgccgccgatatcaatattctttttattatcctcgttttgccaatgaatatgcggaaaggccgggcggttttttttaaccggcgccacggtggcagcagcgtcgctgggcaatgcgacggtagtcgcgtaactcactggtgaaacaagaaaaaaacaaagggtgatcttgcgcatgcctggcccctggtgaatgtttggtttttattaagacgagcggggtttacctgtgaataaggcactgttgctcgtttgttttatatttgagacgtttcattgtgcgtttcatatattaaattcatttccggttaatatatgaaactttgtttcttgtttaatgggaaaactataaatccggtattgaacaagtcaagaaataaaaatgagcgttgacgagaaattccgattattgggtcgccctggtttgcgggagcgacacaaagcaggctgaaatagtcgtgtcataaatgcgcgttagactcgcggcattctggcattactgactaaaaatcatgagcataaaactgacacttggccgccgggtaaaacctgcggcagcgctgccgcacgcgtttggcatcggcaagagcatgggcttattaggcggcgtaatttgcgttattgcgctattttctctgctgcaattgttttccaccgtatttatttccactattctgcacgacgccaaggttaacctggtgacgggagacgggttgcatcgccagcaggcgacgatggatcgcgccagacagtcgctgctgacggccagcgacaccctgaaccgtgcgggcatctattatctgcaggacaaagtcaccggctccgacggcagttggcatagcctgctggatgaatcgttggcggcgttggaggcttcaaagcaggcctttgcccggttcgagcgcttgagcgcggccgcgcccgaagcggcgggcgctctgaaagacagttatcgcctgttctatgacggcctgaaggaacaggcgcaagggttgcaaagcagcgccagcatcgatgcgtttttcgccgtgccgatccaggcgtttcaggcggatttcaacgaaaagtacctcgcttatcaggcgctgaacgaacagcatggcaatgacgtcaacgtgcggcaattggcggcgctggagcaggccaatacctttgcgcttggcgcattggccgcgctggcgctgatcgccgtgggggtgtggttcggcgtcgcccgctgggtgatagcgccgctgcagcgggcaattgtccacctcaacgtgctggccgccggcgatctttcgcggccgctgccgcctgagcgggcgttgaaccgcgagatgcgtcagctgcaaaccagcattggccacatgcagggcggtctgcagcgcctggtaagcgaggtgcgcgatgcggcgagcgggatcctgaacggcgtcgagcggctggcggacggcaatcgacagttgacggcacagtcggcgaagcagaacggggaactgcagttggcgaccgagcacgtgcagcagttggcggcgcgggtggaagaaaacggccaatacgcgcagcaggccagccaacgaaccgaacaggcccggcagtgcgccggcgccggtgagcagatgatgcaaaccgtcaatgtttcgatgcacgggatcgtcaaccaatcggctgagatgcgcggcattgtcgcgctgatcgacagcgtggcgtttcagacccatattctggcgttgaatgcggcgatcgaggccgcgcacgccggcgttcacggccgcggtttcgccatcgtggctaaagaagtgggcttgctggcgcaaaagagcagccattcgacgcgcgatattcagcagttgatcggtcgctcattgcagcaaatcgatcaaggttcgcaggcggtcgaacggctgacgggcaacctgcgcaaaattatcgatctggtgaacaaatgcagtgcgctgatgggggaaatctcgctggcgtcattcaatcaaggggagagcatccaggacgtgacggcgcgcatcaccgcgctgaatcaggtggcgcagcaaaccggcgccgtggtgagcgcggtgaccgaggcttcgcagctgttgcagggcgagtcggaacggttagaaaaagtgatggcgcgtttcaggctgccggcgcaataaatacttccgatgcaggttaatgaataataacgctgcgcttaatgttattcattatttccctgtgctgagggacgttatttcgataaataaaaacaggccggcgcttatggattaaaaaagcgccggcctgcagagattattttaacgggaggattaacggctggtctggtggccgataataccgcccagcgctgcgccgccgagggtgcccagcgtgctgccgtcggtcagcactgcgccgccgaccgcgccgacgcccgcgccgatcgccgtgttgcgatcgcgattggacatatgcccacatgcggtaacggaaagcgtcgccatcaccaccaccaacacacctgcggcacgtttaatattcataatgagttcctggtaaattggctgattaatggattaaaaataatccgattaacccaccggtagaagttgggatgaatgtattcctccgaaagaaaatcgaacaggtaaaaattcttaattttgcggcggtgaaaagcgattgctcgccgaatgtgcggccaccgacaaaaccgctggtctatactgggaagacgcctcgcgggggcggggcacacactctggaggccgccatgtccgatctcgtttccgcgtccggcaaaccggtgaaaatccccggcccggatcacccgatcaccttgactcgtcatccgacgcgggtcgtggtgcgtgctgccgggaaaaccctggccgacagtcgcaatgcgctcatcctgcaggaagccacctatccgccggtgttttactttccgcgtgaggacgtgaagatggcgctgttgcagaaaaacgagcacgtcagctactgcccgtataagggcgactgcagttatttcaccttcgcgatgaacggcgcacagggggccaatacggcctggagctatgaaatgccttacaacgccgtggtggcgatcaaggattatctggcattttatcccgacaaagtgacagaaatcagtactgaagcctgacctgccgccgccgccgggcgggggcaggttgacattccgcttatccctactcattatgtgtattactggaaactgatacgctttccttatgttttaatccgacataaacgaaactctgagcaggtgccaaggtgtctacctctacgcgatttgccgttgccatccatatcctgaccaacatcacgctgtgtcgtggccagacggtgcgttccgaagatatcgcgcgcagcgtcaacaccaacccgacggtggtgcggcggatcctcggcgcgctggcggaggccgggctgacctattcgcagatggggcaaggcggcggggcgctgctggcgcggccggcagaagcgatctcgctgctggacgtgtatcgcgcggtggaggatcaaccctatttcatgctgcaccgcgcccggcctaacgatgcgtgttatatcggccacgcgattaccccggtgctggagcaagagtttgcgcgcgttggtcacgcgctggaggccagcctggcgcaaaccagcatcgccgaaatggccgggcaggtcgagcggcaagccggctatcctttcgtcccttgttcagcgcaatatcaagcggatacgcaataaaaacccacgccaattccgtcttcccgcagagcattttttgcattgcgttaatgtaattgtgtaagttacattagctcgcatcaagtgtgatgtggctcacgttttagactgcctccccacgataatcgatcgattggccggaaaccttttcttccggcgcagattcgctgtgcttataaaccaggagagaacgatgttagaaatgcttgaaagcttggccaccgtggtggtcctggtgccggtaatggtggccgtcttgctcggcgcgatttacggcttgggtgaagtgttcaacgtcttttccgctatcggccgcaaaaataacggctgaatttgaacgtcaggggacgcaacgccccctgacgcaggactacaataccgtcgccaggaagttgcgcgtcctctcatgtcccggcgcatccagaacctgctgcacgctgcccgtttcaaccacctttccctgatccataaagacaatctggtcggccacttcgcgggcgaagccgatttcgtgcgtgaccaccaccatggtcatgcccgaatgcgccaggtctttcatcacctgcagcacttcgccaaccaattcaggatcgagggcggaggtcggttcatcaaacagtaacacctgcgggttcatcgccagcgcgcgggcgatggcgacgcgttgttgctggccgccggacagttctcgcggccaggcgttgatgcgatgttccagcccgacgcgggccagcagctgcttcgcccgttcctgcacctcggcttttttttcctttttcacccgcagcggcgcgtcgctgacgttttgcaacacggtgcggtgcgcaaacaagttgaactgctgaaataccatgccgatgcttttacgctgttcggccacctcggcttctttcagctcgtacagatgccggcctttttgacgatagccgatcagctgttcgccaacgcgaatggtgccgccgtccagcttttccaggtggttgatgcagcgcaacagggtggatttgccggagccggaagggccgaggatcaccgtcaccgagcctgccgggatggtcaggctgatgtttttcaacacgtcggtgccggaaaaggatttccgcacccggttgatgtggatggatgcgctcattgttcacctccctgaggggctttgcggttgaggaagaaccagccgcggcgcgttgcctgcgtgccgcggccaaaatagcgctccacgtagtattggccaatcgacagaatcgaagtcatggccagataccacagggtggcgaccagcagcagcgggatgacctcgtaggtgcgttggtaaatgatctgcgccgaatacagcacgtcctgcagggcaatcaccgacaccaccgcggtggttttcaactgcccgatcacctcattgcccgccggcggcaggatggtgcgcatcgcctgcggcaataccacgcgccacaggatttgcccacgacggtatcccagcgctttggcggcttccagctggccgctgccgacgctttggatgcctgcgcgcacgatctccgccgcataggccgactgatgcatcaccagcgcgatcaccgccgcgctgaaggtgctgataagggtattggtcggcgcgctggcgacttcgccaagaaacgggatccacaggctgatgcgcggataaagcgcggcgatgttgtaccaaaggaacagctgcaccagcatcggcaccgcacggaagaaccaggtgtagaaccagcttaccgcaaccaataccggattggccgacaggcgcatcagcgccagcagcacgccaccggcgaagccgaacaccaccgaaatcaccgtcagcttaagcgtcatgagcacgccgttgaggatggaagcctcggtgaggttttccgccaccaccgcccattcaaagcgcgggttgtgcagcatggaattgatgataacgccgacgatcaacagcacaatcagggcgctgagccaacgcccgtaatgccgatggccgacgatgctcagttccgcgtcgtcgacagggtgttgcccactcatttggcgatctcttcattgatgccggcggttttcactgcaccaaaaccgatatcccagccgtcgaggattttctggtaactgccgtcggcgatcagagaattcagcgctgcctgcaccggtttcaccagttcggagcctttcggcagggcaatggccaccgtggtgccgtcaatgttgatatcaccggccagcgtcagcggtttaacgtgggtggcctggtagcgcaacccttcatacgggccgaaaaacatcggtacgcggccgctgatcaccgcttgcaccccggccgggcggtccgggaagatcggcatggtgatggccggcttgccggcggcgacgcattgatcgctggcctgctgcaggcgggtgatctgcgaggtgcctgcgccggcgccgacggtctggccgcacagctgcgccagctcggtgtaagggcctggcgcggcgtctttgcgggcgatcaaggccagcttggaagcgtggtaatagccgacgaagtccacctgttggaagcgctttttgttggcgtcaatgttggccagcgcgacgtcataacggccggacttcaggccggggatgatgttgtcgaagccgccggtgtccttccagtggatccccacgcccaggcgatcggcaatcgcgctcatcacgtcgatttcacgcccggccagcgttttgttgtccgcctggtaaaaggtggtcggcggggtgttcgggttggtgccggcaacgatgtagccggcctttttgatcgcttcaggcaggctgtcgtgcagcgccggatcggcggcagctttcagcgccgccttgaagggaacatcgccttcagcggcatgaccggctgccaacggcgccagcgtggaggaagccaacagcagggacagtacggtgcgtttgaatgtggttttcatcatgatttccctgcggattaagccgattttacgttagcgaagttgattgccggttccggcagacccaggttttcacgcagggttgcatgctgatactcttcacggaacaggccacggcgacgcagctccgggatcacctgctcgacgaacagttccagctggttgggcaataccgccggcatgatgttgaagccgtctgcgccttgctgttccagccacagctggaagtcgtcggcgatctcttcggcggtgcctaccaccacgcggtggccgcgcgaaccggccgcgacggccgccagctcacgcagcgtcaggttttcccgcgcggccagatcggtcagcagtttcacgcggctttggccgccttcggtggcgcccacgttcggcaccgggccgtccagcggataatcgctcaaatcgaaaccaaagcgcgccgacagctgctcaatgccgttatcgatatccaccagttgattcagctgataccaggtttcctgcgcttcttctttggtacgcccgacaatcggcatcacacctggcaggatcagcaggtggtccgggttgcggccggcgtcggccacgtattttttctgactgcggtagaaagcttgtccttcttccaggctggcggcggcggtgaacaccacttcggcggtttccgccgccagctgctggccggccggggaagagccggcctcaatgatcaccggccgtccttgcggcgagcgggaaatgttcagcgggccctgcaccgagaaatgcttgcccttatggttggcggcgtggattttctcgtcgatggcgtacacgccattttgcttgtcgcgcacgatggcgtctttttcccagccgtcccacagtttgtagctggcctcgaggaattcccgcgccacttcatagcgttcggcgtgcgacggcagatcttcacggctgaagttgcgcgccgcatcgctggagaaagaggtcactacgttccaggcggcgcggccgtggctgatatggtcgatggaggccatggcgcgtgccaggtggaagggttgatcgaacgtggtggaggcggtcgccgccagcccgatatggcgggggttgaccgccagcgccgcgagcagcgtcagcggctccaggcgtgacatcgtcgagggcaggcggtgcacgctggttgccaacgcgtcgccgacgaagaacatatcgaaagtgccttcttcggctttttttgcgatccaggtgaaccagtcgatatcggtcggtgaaccgctggcgccttctgcgcgccatcccccgatgtggtgccccagagcctgaacgaacaggccgagacggagttggcgcgatggtgttgaaggtgaagtactcataattattcctgttttattattaatttaacaatgcaatcagtcgcggcagcgcgccaggggacataagcgcgcagtcgcggataacgctctcgccttcgaggcccggaagcagctgcagaatggcgcgcagcttggcgtcgaggtctgtcggccgggcggcggtttgctttcttgtgactatgtcacttattcgcctcccgtcctgcagcgtcagggtcagacgatggaagcgcatctccggatcgagcgcgtccggcggggctgcgggatcgacatggcgcacaacttttgccgccagggcggcgatagccgcatcgacaggctgttcgccgtaatgcgtcagcgggacctcgccgtggtatagcgcatcggcgatgacgtattcgaggctaaagcgcgcttccacaccggtggccggttggcgaataaagggcgcagtatctgcgccgggcggaaaactgacctcaacctgtgcgatctccgcaagggcgtcgccttgtgccagcagccgcgcgcgcagggcgagcgccgcctcggccgcgctgtgagtgccaccgcaagtcgggtaccgcttgaattccagccccggctgcaggatgcgccagggcgtgccccagccggcggtcaggcattccggtttttgccggccgccgccgtgggaagtcagcaggctgtccagcacgccctccggttggccgatgaaaccggcctgagccagcagagcggcgttgaccgcgttgcgtgccgccaacccggcatgcagcggtttggccgccgaaccgaactggctgcgcaggcccgctgcctgcgtggccgccaggcccagagcaatctgcgtttgccgctggtcaagctgcagataacgcgccacggcggcgcaggcggcgaccgcgcccagggtggcggtgctgtgaaaacccagcacgtaatgttgcgtgccagcggccaatcccagccggccagcggcctctacgccgatgacataggcggttaacagctcagtgacatcgtcactctcaccgttcagcgccagcagggctgagagcactacggtgctcggatggccacgcagcgcaggatggtaatcatcgaagtccaacgcgtggctgacatagccatagcgcagtgcgcggttctcgctgccgttcggcggaaacgtcttaccgatcgctgccagacctgcatcgctcaacgccccgcgggcaatcggcagcgcgcaggcgaagtaatctttcacgccgcggcgagcggctgacagggcgttttcatccggctggctgttcaatatcagatgggcgaattgggcggttatcggtaatgacaaggcgttaacacctgaatttatatacggttatgcacgagtgcggggtgaaaggtattgtgtggcgattttcgttgtcccgaaagaacgaacggcgcttccatatctctgaatggaatataacgacggcactgcgccgccgtcagagctgctggcaggcgcggcaggctgcgccttagctatttttgtgcaaagcaaagctgtatttgctctagcacgatagaggactcaggccgagaaaaggcgaacgctcatgatgtcgataaatgccctgagacgcggtgtaagatgtttgcttgaaggccagagaattttgagactgccactgtgtcggcagtggtcgccaagcaccggttggagtcgccgtcgctccagcgcctctcgcaccgcgaaatcgggcaagcaggcgatgcccaggccctgttccgccaggtaaatcagcgtgtcgacggtgttgcataccgtgcgcttgcccaggccttcgtcgagcagtttatctccgcccgccaccggccaggtctcgattttgccggtggtggggaatctgtataacaggcaggcgtgatcgcgcagttctgccggctggcggggtattcccgctcggcgcagatactctggcgccgccaccagctgtaggtgaaacgtgcccagttggcggctcattaagcgagagtcctcggtatcgcccacgcggatcaccgcatcgaacccttcttcgatcaccgcgactcgacggtcggaaaaatcggtttccagctcaatctccgggtaacgccggacaaattccgccagcaccggattcagcaggccgcccaccagcggcaaactgacacgcagcttgccgcgcggcgcgctgtgcgtatcgctgatttcccgttccgccgccgccaattccccgagaatacgctggcagcggtgcagaaacagccggccttctgcggtcagcgtcatgctgcgcgtgctgcggtggaacagacgcgcgcccagccgattttccaggcgggcgatgcttttccccaccgcggaagcggaaatgccgagcacgcgcccggcctctacgaaactcagcgtctctgcggcctgcacaaagacgttcaccccagacagattatccattgcttgccccattgcggacttgagtgtccgctatgaaaggaaatctagcctgttttttcgttaatcaccacgctctatgctcggtggcgacagcatgggctgactacctggagtaataaagatgaatgaatacggatcctctgccaacgcgattgacggcgcgatagagcaagccttgcgtgaaaaacgattggttggcgcggtcgttttggtggcgcagggcggtgagatcgtttatcaccgcgcggcgggcatggcagatcgcgaagcgggcaagccgatggcgctcaatacgctgtttcgtctggcctcggtatccaaaccgatcgtgtccacggcggcgctggcattgatggcgcaaggcgccatgcggttagacgatccgatcacccgttggctgccgaattttcgcccgcggctggcggacggcaccactccgttgatgacgctacggcatctcatgacccacaccgccggactaagctaccgctttttccagccggaagggggattctatgcccagctgggcgtctccgacggcatggatgaagcgtctgtcagcctgcaggagaacgtgcggcgtattgcctgcgcccctttgctggctccgcccggcgcggcgtggcgctattccatcgccaccgatgtcctgggcgcggcgatcgaacaggcgagcggcctgccgctgacgcaggcagtaaaaaaatgggtgaccgggccgctggcgatgacggataccgatttcctggcggtggatcccgcacgtttggcggccgcttacgccgatcatcccggcgagccgcgccgtttgcgccaaccggatcgtttaccgttcatcgatggctgcgccggttttcatctgtcgccggcgcgtgcgctggatccgcaggcgtacgcctccggcggcgccggcatggtcggctcggcggaggatttcctgcgcctgctggaaacgttgcgccaggggggcgggcaggtgctgccggccgaatgggtgacggcgctgaccaccaaccaaatcggcgatttgccgatgccgttttggccggggcgcggtttcggcctcggcattaccgtactgaaagatcccgtcgccgcgcaaacgccggagtccgttggcagctggcgaatgggcggcacctttggccattcctggttcgtcgatcctgtccggtagctcagcgtcgtcgcgtttaccaacacggcgctggagggcatgtccggcgcttttgtcggcgagatttgtcaggcggtctatgccgcgacgggagcgatacaatgcgcctgatgccaccgattttctttatcgcgctggggttgttcggcgtttactgcatcgagtttggcgtggtgggtattttgccgcagatcatcgcgcggtatggcatctccacggcgcaggccggctggctggtcgggatcttcgccctgaccatcgcgctgctcgggccgctgttggtgctgctggcgtcgcgattcaatcgcaaacgcatgttgttgatcgcgttgaccgtgttcgcggcggccagcgcgctgtccgctcagacggacagtttcgccatgctcatgttgctgcgcattgtgccggcgttgtttcatccgatctatttttcgctggccatggtggcggccgcggcgctttatccgccgcatcaggccaccaaagcaaccgcctatgcgttcatcggcaccagcatgggcatggtgttggggataccgttgacgcaatggatcgccgggcagttcagctatgaagcctcgttccggttctgtgcctgggtcaatctcctggcagcggcgggattgctgatgcggttgcccgacgtcgccgttcagcgcctcagctatggcaaacagctgacgatcctgcgcagcgggacgctgtggctgaatatcatcacctgcgtgctgatctttgccgccatgttcgccgtctacgcttatgcggccgagtacctcagcagtgaagccggcattggcgccgccgccatcggctttcttctggtggcgttcggcgtgggcggtgtcgcgggcaacctgttggccggcaaggggttgagccgccatcgagcgctgacggtgctgctgcacccgctagccttgattgcggcttatgcgctgctgtatcactacggcagctcgaatatcggttcgatgacggcgctttgtctgtattggggagcggcgcacaccagcggtttgatcgtgacgcagatctggctgacatccgaagcccccgaggcgccggcgttcgccaccgggctgtatatcgcctttatcaatttgggcgtggcgctgggctcactggcgggcggctggttcatcgccgcgtgggggctacagggcagcctgctgtgcggagccttgttcgccgcgctggcggtgattacgatcgccgccaggctgcggttgcagcggcagactaccgctgcgttgcgtcgatcatcgccatcacctgccggaacatcgcgctttccgcatcggccagctcgttgaccagcgtaaagtgattgcagtggcggtcggccagcaactgaacgtcgaggccgcgcgccagacaggcgtcataataggcctgcgtctggtttttgaagccttgcgtttcccgctggccgacgtcgagcaggatctgcggcgcatgctctttcgctggcagcaaaaacagcgggctgagcgtttgcgcctgttcgggcgtcaggtgcagccagtcgttgatgtagatatcgcacagcgggcgcagatcgtagaggccactcagcgccagcgcgcctttgatcgcgtcgggcggcaggcgatagcgttgctgccagccgtcggcgatcagcatgccgcacaggtggccgccggccgaactgccgctgacgaaaatgcgcgccggatcgatgccgaacggcgccccgtgatgataaagccaggcgacggcgctgcgcacctcgtgcacgatctccgccagcgtcgcttctggcgccagtgtgtattccagcgtggcgacggccacgccgcgctgggcaaacgcggcggccatcgaacaggcttcctctttgcgctgcgaatgccagtagccgccatgaataaagatcagcagcggggcgggctgcgtgcaagccgggaacagatcgaggcgctcggcggcgctcatgccgtaacgcagatcgtaaatgccgggcgtctgtgccttggcgcgctgggccagcgcggcgtattccgccatgcaggcgtcaaaatcttccaccgaagcgcgggcgttgtattgcaccgctctggcggcggtatcgtcgaacatcaggtcgattttcataacttctccttgttggtgacgctcgattatccacctaatgcttttttaatgtttgatgcggaatgcgtcgccgacgggcgttcttttttgcttctttttgcggtatattgctgttttatgcgttctactgcggaataaactcatgcacaaagcggcacgacagcgccatttactggatttgctcagcgaacgcgggcaggcggcggtggcggaattggccagcgccatcggtgtttcggtcgataccgtgcgccgcgacttggccgatctcgagcggcaggggttggcgcagaaacatcacggcggggcgatagcgctcgaaccgtccggcatgccgcgccaggcgcgcgctgcgctgttgccgcaggtcaagcagcggcttggccgcgcggtggccgcgcagatcccgcccggcagcaccctgatgctggatgcgggcagtacgctgttggcggtggcgcaggcgttgcgcggcccggcgacggtgatcaccgcttcgctggatatcgcgcagtgcctgagcgacaggccggagatcaatctgatcttgctcggcggccagtgggatgcgcgccagcggctggtcgccggcagcgccacgctggcgttgctggcgcgctaccgtgcggatatcgccttgctgggcgcctgcgcggtgcatcctcagctgggactgagcgccggcgaagaggccgatgcagaggtcaaacgcgccatgctggctaacagcggcgagcgctggctggtggccgaccatatgaaactggatcgctgcgagccgcatcacgttgcggatctggcgcagatccaacgcctgtttaccgatcgcccgtgggacaacctggacgaacaatcattgattgaactttgtgtcgtcgccgacgaccgctagaggagaacactgatgaacgataccgctcgaccgttgcaggtggccatgattggctacggctttgtcggcaaggcgtttcacgcgccgctgattaacgcggtgccggggttggaactgagcgtggtggcttcgcgcgatgccgccaaggtacatgccgatctgccgcacgcgcaggtgatcgccgatccgctggaggccatccgccggccggaggtggatttggtggtgatcgcatcgccgaacgacacccatgcgccgctggcgctggccgcactggaggcgggcaagcacgtggtggtggataagccgtttacgctggatttggcgcaggcgcgcgcgctgattgccgcggcggagaagcacggccgcctgctgtcggtgttccagaaccgtcgctgggacagcgatttcctgggggtgaaacaggtgatcgagcaggggctgatcggtaaggtgacgcactttgagtcccatatcgaccgctatcgccctgaagtacgggtgcgctggcgtgaacaaaacctcccaggcagcgggctgtggttcgatctggggccgcacatggtcgatcaggcgctgcagctgttcggtttgccgcacagcgtgcaggccaacatcgccacgttgcgccccaacgcgcagattaacgactgggcccacgtggtgctgaactatccgacgcaccgcgtgatcctgcacggcagcatgctggtggcgggcggcgtctcacgctttaccgtgcacggcgagaaaggcagcgtggtcaaagcgcgcgccgacgggcaggagagccagctgctggccggcgtgacgccgggttcggcggagtggggcaaagacgacgacgcgatgagcctgtttatcggtacggagccggtgcgcacgctgccgacgccggatggcgatcagcgccagtattacttccaggtgcgcgatgcgttgcgcggcgcaggcgccaacccggttaccgcggcgcaggcgttggcggtgatggcggtgctggaagcggccaccctggcggcggaaaccggtgtgactcagacgttgccgctcaccgaggcggaaatcgccgcctggtaacggctcgcgtcagataaggcgtcaggcgcatggatacagtgcatgccatgcgtcttccgccatgctaacccctgacataggcttacccgcagtctatgtcaggagtgttcatcatgttatcccacccttcgccgcaaggcgtccgcggcatactggccgctctttctctgagcatgctgctgtcatcgcttggcatcagcattgccaacgtcgggctgccggcgctcgccactgcgttccatgcctcgttccaggcggtgcagtgggtgttgctctgctatttgctggccgtcaccacttgcattatcggcatcggccgtttgggggatagcctcaatcgtcgccgcctgctgctggcgggcattgcgctgtttaccgccgcttcgctggcttgcgcgctggctccgcaactgtggctgttgctggcggcgcgcctggcgcaggggctggggggcgcagtcatgatgtcgatcgccatggcgctggcgggcgaggttctggggaaggaaaaaatcggccgcgcgatggggctgctcggcactatgtcggcggtgggcaccgcgctggggccgtcgttgggcggcgcgctgatcgccggtttcggctggcgggcgatgttcctgatcaacctgccgctggggctgctggcgctgtggcttgcctggcgatacttgccgaatgggccgcgcgcggcaacgcgcgcggaaccgttcgatcgcgccggcacgttgctgctgggcggcgcattgctctgctattcgctggcgatgaccctcgggcgcggcgacttcggcgcgcttaacctggcgttgatgttgggggcgctgttggcgggggcactgtttatccgcgtggaacgccgcgccgcatcgccgctgcttacgccgtcgatgttccgccatccggccctgacggcggggctggcggccagtgcgctggtgatgacggtgatgaccgccacgctggtggtcgggccgttctatctgtcgcgggcgctgggcttaagcgccgcgcaggtcgggctggtgatgtcggcggggccggcgggggcgatcctgaccggcataccggccggctatctggtggatcgcttcggatcgcagcgcatcgcccagtttgggctgacggcggtggccgcaggcgcggcgttgctgtcactgtttaaccgttggggcgtgctcggctatatcgcccccatcgcgctgttgaccgccggctatgcgctgtttcaggtggccaacaacaccatgctgatgaaggatctgtttcctgaacggcgcgggctgatcgccggcatggtgaacctgtcgcgcaatctgggggcgatcaccggcgcgtcggcgatgggggcgctgttttatctggcttcgcagcaggttgcgggcactgcggccgccgcggcttacggcatgcgggtgacctacggcgtggcggcgctgttggcattggcggcgttgctcatcgccttcggcggtcgccgcctgatgctgcgttacggcgcgcgctgaaccgcgtagcgttcttgcacgaaaccgttgtccgatgaagtgacggcaagcaggcgcaggcgctgctcctggccatcggcgccgaataaggggataccgccgcccaacagcagcggcacgcgcgtaatcgtcagttcgtcgatcaagccggcctgcaggaagcgctgcacggtctggccgccgtcgatatacaggtgacggcagccttgctcggccaactgcgccacgatggccgccggttcgccattcatccagcgaacgtggcccgttgcgtgcggcgcgggcggctgcgtcgacagcaccaccaccggcagtgcgccatagggccactcgggaaaggcgcggactttatcataggtatggcggcccatcaccagcgcgtcgatgtcggcgacaaacgcttcaaaactcaacccattgagcagcgaaaccgcatattcgggccgcagcagccagttgatgtcgccatccggtccggcaatgaatccgtctacgctggtggcgatgtaaaccgagcatttcatcaggcgagatctccccgataaaccacatgcaccttgttgccgtcgggatcgcgcaggtaagcgccgaaatagcctttgccgtagtgcgcgcgctcgccgggctcgccttcactgctgccgcccgccagcagaccggcggcgtaggcgcgtttaaccgccagctcgtcggcggcgaggaaggccagcatgctgccgttgccggcgctggcgggctgtctgtcgaagggttggtaggcgtaaaaacgcggcagcgtttggcctggcatcacccagcagcgggcggcggggccgccgtccggcgtcacttcccgccgttgtaagcccaatggcaacagaatggcgtcgtagaacgcggcggcggcatccagatcgctgacgccgacggtaatatggctgaacatggcgcgtttccttccccaagagagaataatgaacgcctaaaacagtagcagcgatagcgcaggatggacagaccgccgtggaggattcggattagggacgcgcgcaggtgtagcgcgcttcacggttcgcggggcaggccgccgttcaattgctctcgacgcgcggattggcgtgggtcggctggctgggataatccacctgatgcttgtgcagataatcgcggatcagctgacgcaccacctgagaaggggtgacgtcctgctgcaggcacagctcttccagggctttcttcttgtccgggtcaatcagcaccgttagccgcgccgttttcttttccatcaggatcctccagagaatgatgactgaatgataataccatgtggacgaagcggccagccagaccgcgtcgccgctcgttcttagcggaaatgcagccgttctattttgcgtgacaggtagccgagttcgcagttgaacagctcgccgctgccggcggccagcgtgcgcagcgtgctgagcggcaacgtcacctgcgccggcgtggcgtaaatgatcacgttgccgctgggggcgacgcaaaataatacggtgccgaatatccggtgcaggctgtggtacagcaggctgttttcatcgggcagatcgtggtaattgagcaccagccagcccccgtcgttcagccgcgcggcgcagttttccaggaatgtctgggtgccttgctgcggatccatggcgaacgccgaatagagatcggagaaaatcaggtcgtaacgcgtctcggcgggcgggcgcacaaagtccatggcgtcggcggtacgcaggctgatggtgtcggtggccggcagcgtaaaatagcggcgcgcgacggcgatcaccgcggcgcgcagttcaaccacgtccagacgcatggccggatcgagcgcgtgcagcgcacgcagcaagctgccgccgcctaaccccaagatcagcgccgaggtcggcggctgccaggccaccgccatcagcatcgctttgatgtagttgtggatcggctgcgcggggttgctgaggctcatcttgctttgctcgcagatgccgtcaaaccgcagcgtgcggtagtccttgtgatcggaaacgatgatttcgccccaggcgtcggtttcgcgagcgatcacctggccgcgcggggagaaatcgagggttctgagtaagctgtcaaccagagacatggtattcgcaggtttcctttggcaagcggcctatttacgggcgcacatgaaatcggcggtgcaaatgcgccggccatcgatgctggcgcggccggtgaagcgggcgatcgcgcctcgccggcgtacaaaggcgacctccatcaacacctggtcgccgggacgggcggcgcgataaaaccgcgcccgctgaatggaagcgaagtagtaatgttctccttcattcaacgccccgagataataatgcgccagcagcccggtgctttgcgccagcgcttccaccaacagcacgccgggaaaaccggcgaagtgcgcatggccgctccagaacgtcggctcattggcggtgatgttcttgatggcgctcagccggccttcggcaatgcaggtgccggcgggcagcacgcgatcgaccaacaggcagggataacgatgaggcagaatcgcctgaatatcgttgaattgcagggggtgaccgtttaatggcatggaagtgcgtgatcctgtctgcggcgaatccggtgcggtggccggcgttcggtccataatgagtgtaatgacattataataaaattatcatcagatgtgccagatgaaagacatgacggcggtgacggttggggaacagcgaaggaggggaagacacccgatcctggcgatcgggcgtggtggcgcgtttagtgcttggagcgggtcaccttgtccaaataacccatcacgaaggcggagagcacgaaggtgaggtggatgatcacataccacatcagcttgttgtcgggcacgttcttggcgtccataaacacccgcagcaggtgaatggaggagatggcgacgatagatgcggcgaccttgtttttcagcgaggtggcgtccattttgcccagccagctcagtttctctttcccttcggtgatatccaattgcgagacgaagttttcatagccggagaacatcaccatcaccaacaggccgccgaccagcgccatgtcgatcagcgacagcaaggtcaacaccagatcggcttcggtaacggcaaaaatatttggcaggacgtggagaatttcctgaaaaaacttgatcgacagggcgaccagagtgagcgaaaggccgaaataaaccggcgcgagcagccagcgggaggcgtacatcgcgttttctagcaagcgttccatcataaaattgttttaaatgcgtagcaaaaagggcgctcagtatagcgcaagaggcctgggtgaaatcaaccgcttgcgccagcagagggcgctatcaggccactacgcgcgccgtttttcgcccgctgcggatccacagcgccacggcccccgccgccgtcgccagcgccacgacgcccggccagcccgcgcttgccagaatgcggctgccgagggcggcgccggtcgccataccgatgaacacgccggtgaacaagagggcgttcaatcggctgcgggctgccggatcgagaccgtaaacgatggtttggtgcgcgatcagcgtagcctggatgcccaggtcgaatccgacggcgctcagcgcaatgagcgccagttgcgccgggagcggcaacagcggcagcagaaacatcaaggcgaaggaggccagaaccagtcccgcgccgatacgggtcacgacgtcagggccgtgccgatcggccagactgcccgccaacggcgccgccagcgcacccgccgcccccgccaggccaaacgcgccggcggccgcgctgccgatctggtagcgctccgccagcatcaacgccagcgttgaccagaaagcgctgaagcccaatgacagaaagccttgcgccagcgttgcgcgccgcagcgcgggatactcggtccacagatgtcccagcgagcgcagcagcgcggggtaactcagcgcgttatgagggcgaagacgcggcaacatgcgccagatcgccagcgtgatcgacaaaacgcccagcgccgcgagtgcgtagacgctgcgccagccggcgtactcggcgagtgcgccgctgaacacccgcgacagcaaaatgccggccaatagcccggtcatcactgcgccgacggttttgccgcggctggtctccggcgccagcgtggcggcggcggggataatgtcctgcgcgacggtggcggtcaggcctatcgccaggctgctgagcaacaacagcgggaacgaggcagcaaaagcgcagagtaacagcgtcagcgtcagcagcgcgccttttaccagaatgatccgccggcgatcgtaccggtcgccgagcggcgccaacagtaaaatgcccagcgcatagcctaactgggtcagcgtcggcaccatcccggcatcggcgacgccggcgtggaaatcggcgcccatcatgccaagcatgggctggctgtaatagattgacgcgacgctgaggccggcgccggcggccagcagaaatacgacgttggcggacggtgcgccgtgggtggtggcggtgctcatggcaaaaattcctgtaaggtgaatgtgcggtcatttttaccgcttgcttcatgccgctgtagccccctcgcaggtaaaactgttatacactcaacgtatgaataaaattaacttacctaacggcgaccgcataactttgctgcatacgctggtgcgcatcgtcgaaagcggcagcctgtcggcggcggcgcagcagctgggcacttcgcagccgacgatcagccggcgtctgcaggcattggaacagctgctgggcgccaaactgatccagcggaccacccacgccctcaaactgaccgacgacggcgagcgctgttaccgccaggcgcgggggctgattgaacaatggcaaagcctggaagaagggcttggcggcgcgcgcgacgaaccggtcggcgtgttgcgcgtgcgggcgccgcacgcattcggccaggatcagctgatcggtccgttgggcgagtatttgcggcgctacccgcaaacttacgttgagtggacgctgaacgatcattctccggactttattcccgagggggtggattgcgccattcacgtcggtgcggtgaccgatccgtcggtcgtggcggtgttgctggcggaggtgccgcgcagcacggtggcgtcaccggcgctgttggctgaacgaccggcgatcgtcgatctcgacgatttggcctcattgccgtggctggcggtaaacagtttttatcgtaatgaggtcgtcttgacccacgcgaccagcggtgaacagcggcgtttcgacatcgcgccgaggttgagcaccgacagcctttatgcggcgcgcaaggcagcgctggaagggctgggcgtcgcgatcgtgtcgtcttgggtggtgaaagaagaattggcgcaaggcgctctgcagacgctgttacccctgtggcgagccgagccactgcctatttacctgttgtatccctacgccagctattatcccgcgcgtttacgcaaattcatggaaatgatgaaagaaacgatgccgcgcattctcggcgcgcagccgccgacggggcgctgacggccttcagtgtctggcttttttaccgtcgctgtggccgagagaacgatcggggaagctgtgatcgcgcagccgctgctttaactgcgccgcatcggggaagccgccgtcaatcttgcgatcccaaatcatcacgccatcgacgctgatttggtagaccccgccggtgcccggcatcagggtgacggaggcgagatcgtcgccgaaggtgttcagcagctcttgcgccatccagccggcgcgcagcaaccagttgcattgtgaacagtagtgaatcgtaacggcgggtgcgtttttcatcgttgatcgaccggttagtggtgacggcttgcaatcagcctgctggctcgcaagcgatggtggctgtgtatcgccaaatagtcaagcgcctgctgcggccagagcgacaaggggagccgagtgtgcatcacggccgcttgcttccggcaaaccattcaaccccgcgcagcatgcccgcccaataaaaccggggtaaaaaccaggctttcagccaccaggccatacggctgggctgggttgcgtcgagcagtggaaacgtgggcagcaatttaccgtcatagccaaactccgccagcacaactttgcctttctcgaccgtcaatggacaggaaccataaccatcataatgggctgtgagaggcgtgccatgaatacgtgccgcgacgttttccgccaccaccaccacctgctttcgcgctgccgccagggttttggcgtttggcgttgagcaacagtcgcctaccgcaaaaatatccggccaatgcttatgttgcagcgtcaatttatccacatcgcaccagccggcgccatccgcgagtccgctttgcgaaataaacgccggggctgattgaggcggcaccacgtgaagcatatcgaagggtagggttaactcgcgtttttcctcttcatttgtctccacggcaaatatcgcttgccgattttcgccatctatacggattaaattatgattgaagttgacctgtgcacggtatttttccaaatagccgctcagcggggggacaaattgcggaatgccaaaaaccgccgtgcccgcaaggcagaaattgacgttaatattattcagaacgccttgccgccgccaatggtcgcatgaaagatataaggctttttgcggcgcgccggcgcattttatgggaagcgtgggttgggaaaatatcgccttgccgccttgcatctcccggaccagttgccaggtgtattctgcaagatcaaaacgataattagaggtgacgccgttaaatcctaacgtctcttcaaggccctctattttatcccaacgtaaaacaaggccgcaggcaacaataaggaaatcatagcttacgcgtttaccctgacgggtctcgatatatttttcattgggatcaaccctgacaacgctgtcctggagccatgagacgccagaaggaataacatcgcgcatggcgcgctgcgttttattgatatcaaagagcccgccgcccaccagggtccatgccggctggtaataatgacagtcattgggttcaacgacagttatatccgcatctttaactcgcttccttaagcttgcgatgacgccgatgccagatgaaccaccgccaataacaacaactttcttcagggtgtttattttttctggtttcatgcaggtctcctttcataagaaagtagggggttgtggctcagatttaaagataatttatagaacttatggttatattaaaaatcacatattcgatttagctatatgtaatagctaaatgtaataagttatttgacaatcaacgcaaactgatcgttaataaatgccataaatatcgaaagggaattaatgcattggattttttccattttactttttataccctgacgctgttggtgataaccgggggaatagtcggatttctcctggctctgaccgggggaggcggatccatcgtctgcgttcccttgctgctgtatatggtgaaaatcccggatacgcacttggttataggcaccagtgccatgtccgttgccattagcgcgctgatcaatctttttgttcatgccgccaaaggaaacgtccggtggcaaaccggcgttaccgtttcgctggtggcggtggtgggaacgctggcgggctctcaggtgggaaaaatgacggacgggcaccatttaaccctgcctttctctctgctgatgctggttgtcgccggattgacgctgaaaagaaatcatcgggcaggcaacggattaccgtcctcccatccgacatttcatcccgccatcgtgtggcccagcgtgctggcgctgggcgcggtggccggttttttgggcatcggcggcggatttttggtggtgccggcgctgctctggttcttccgcttttcgctggttgaagcggtggcgacctcactggtcgtggtttccgccatgggattatcgacaagcgcaagctatgccatgtccggcaaggtgtcgctggtcattacctgctggctcatcgtcggcggcgttctggggggcgtcgtgggggtggcgctcaccgagcgcctgaaaaaacgcgaggacattatccgtgtgctctatgccggcatgttgttggtgctggccctttatatgctttttaaaagcctataaaacaaaaggaaaaaatatgcacatccgtacttaccatcatcagctctccttttcgggggcgcccgcagcgaatgatttcgccatcctgcatcaacaaggctatcggtttatcgtcaacaatcggccagatgaagagccgggcgagtaccttaaccatcaacaagaaaaagcgttggctgagcaatggggaatgggctacgtctatctgccttacacattcgacacgctgacctgggagaccgtttatatcttccattacctgttgcggcggggtgagaagaccctggcgcattgcaggagcggagcgcgttctgcctgcctttccctgctgtatgcgctgcgcgaaggccagatagacgaagcgcaatttcgcagccagtgcgcagagtatggcgccgatgccgataaggcgctgggctggtatggccggcatcaggccgttcagcctcacgcgcaagtgcacgcgttttatgagccggaaagcggcagcctgcagtatgtcgtcgccgatcccgcagcgcgtcgctgcgccatcatcgacccggtgctggattttgatcgccgatcgggcacggtctcgcatcagcaggcccgcaccattttaagctttatccagcagcaaggatggggagtggcctgggtgctggatacgcacccgcatgccgaccatttttctgccgccacctggctgtcgcagaaaaccggcgccctcaccggcataggcgaaaaaattaccgccgtgcaggggctgtggcaagacatctataatttgaaagaattgcctcctgccgagaccctgtgggatgcgctgtttgcggatggggacgtcttttttatcggcaacctgcgtgctgaagtcttgctgtctcctggccacaccctggcgtccgtcacttatcacatcgccgatgcggcgtttattcacgatacgtttttcatgccggacagcggcaccgcaagggccgattttcccggcggaaatgcggaagccctgtgggattcgttgcagcggatcttgagcctgccagcggatacccgcctgtttaccggccatgattatcgcccggcggggcgtgaggcccgctgggaaagcaccgtgcgagagcagcgcgagaacaacccctgggtggccaacatggataaagcccaatttatcgcgcaaagaaagcagcgagacgccacgttgccgcatccggaattgatgctgatggcgctgcaggtcaatattcgcggcggcgttctgccagattgcgaagatgatgggcggcactacctcaaaatccctgttaatcgcttcaagggataaatcaagccatggaggcgcgatcgttcacggctgccaacctcaaggcgatcgcgccgtctgttaatggttttttatgaaataagcagactgattcatatttaattatttgtttttacacaaaacaggtggcacttgccctcaccgaatacagtcactacattaacaactgtacttcccactctgctaaggaaaacaccatgaaagctgccgtagtgacgaaaaaccataccgtagacattcaggataaagtgctgcgcccgctgaagcacggcgaagcggcgttgaaaatggagtgttgcggggtgtgccacaccgatttgcacgtgaaaaatggcgatttcggtgaggtgccgggcattacgttggggcatgagggcatcggcgtggtctccgccgtcggtgagggcgtcacctcgttaaaagtgggtgaccgcgccagcgtcgcctggttttaccaggggtgcggccattgcgaatactgcgtcagcggcaacgagaccctgtgccgctcggtgaaaaacgccggctatagcgttgacggcggcatggcggaagagtgcatcgtggtggcggactacgcggtgaaagtgccggatgggctcgattctttcgccgccagcagcatcacctgcgccggcgtcaccacctacaaggcggtgaagatttccgatatcaaaccggggcagtggatcgccatctatggcttgggcgggttgggcaacctggcgctgcagtatgccaagaacgtgtttaacgccaaagtgatcgccatcgacgtcaacgatggtcagctggagttcgccaaacagatcggcgccgatctgaccatcaactccaaaacgcaaaacgcggaggagatcattcagcagcaaaccggcggcgctcacgcggcggtggtgacggcggtggcgaaagctgccttcaactcggcggtgaatgcggtgcgcgccggcggtaaagtggtggccgtggggctgccgccggagagcatggatctgagcattccgcgcctggtgctggacggcattcaggtggtgggttcgctggtgggcacgcgcgaagatctgaaggaggcgttccagttcgccgccgaaggcaaggtgacgccgaaagtgaccaagcggccgctgggggatatcaacgccatcttcgacgagatgaaggcgggcaccattcgcggtcgcatggtgatcgatctcggcatggcgaagtaggccatgcgaaaaaagaaggccacctgcgggtggccttcttgtcattacgccggattcagaacaggcccagcggcttggcgtcgtagctgaccagcaggtttttcacctgttgatagtgcgacagcgccgccttgtgggtttcgcgtccgatgccggagttcttgtagccgccgaacgcggcgtgcgccgggtacaggtgatagcagttggtccacacgcgcccggccttgatcgcgcggcccatgcggtaagcgcggttgatgtcgcgggtccacagcccggcgcccagcccaaactcggtgtcgttggccagcgccagggcttcggcctcatccttaaaggtggtgacgccaatcaccggcccgaagatctcctcgcggaagaaacgcatgctgttgttgccggtaatcagcgtcggctgcaggtagaaaccgttttgcacttcgtcgccgcgctgggcgggctcgccgcccgcaacgattttgcctccctcgtttttagcgatctcgatataggacaggatcttgtcgtactgctgttttgacgcctgggcgccgatcatggtctcggtgtcgaagggatcgccctggcggatggtagcgatacgcgccagcactttctccataaactgcgggtagatggattcctggatcagcgcgcgtgaagggcaggtgcacacctccccctggttgaagaagcccagcaccagcccctcaaccgctttgtcgataaactccggttccgcctgcatgatgtcttcaaaataaatgttgggcgatttgccgcccagctcgacggtgctggggatgatgttctccgccgcacaggcgaggatgtggcggccgaccggcgtggagccggtgaaggcgattttttcgatgcgtttgctgcgcgccagcgcttcgccggcctcggcgccgaaaccttgtaccacgttgagcacgcccggcggcagcagatcgccgatctcttccatcagcacgctgatgccgagcggcgtttgttccgccggtttcagcaccacgcagttaccgcccgccagcgccggcgccagtttccaggcggccatcagcagcgggaagttccacggaatgatctggccgaccacgcccagcggttcatagatatggtaggccacggtgttctggtcgatctccgccgcggtgccttcctgcgcgcgcaggcaaccggcaaagtaacggaaatggtcgaccgccaacggcagatcggcattcagggtttcgcggatcggtttgccgttgtcccaggtttcggtcagcgccagcatctccagccgcgattcgatgcgatcggcgatcgccagcagcacgttggaacgctcctgcacgctggttttaccccaggcgtccgccgccgcatgcgccgcgtcaagcgccagctcgatgtctttggcgtcggaacgcgggaattcggcgatcggctggccggtcaccggcgaggtgttggtgaagtagttgccggataccggttcgacgaatttgccgccaatgtagttgccatagcgtttgcggaacgaaaccagcgagccaggcaaaccggggtggacatatttcatgttaagcacctctctgcagatgaaaagcggcgctattgggctgcgcctgtgaatgcggcatgtcgccgcagcaaagagaagcacggcgcgtgccagattagcgacagaggtagcatccgtaaaaaaaagaacgagttattaaaacattaagcattgagagggctgagaacttcgggtggcgccgccgtcgccgatgattttttgtgtcccgtgtcgcaacgcctgatacacatttatgatacacatttgcaacactcgcgaacgggggagaaacgcatgttgtctgacgaccgcttgcccgcagagggcgccagcttgctgacccagccgttggcggaatcctggcaacgcagccagggttatggcttgacgcgcaccgatcaacatttcccgtttatcaaagccggattgctcgaagagctgcgcagccgcaacgattgggtgccgcagcgggtacagccgctgatcgagcagctgggcgcgcaaattacgcgccagcccgccattgtggtgatcgccgacgccgacgggctggtgctggaaacccgcggcaataccgactttctgcataaggcgtcgcgctttgcgctggcgccgggcaaccagtggggagaagcggagcggggcaccaacgccatcggcaccgcgctggcgctgggtgcgttctgcgaagtgcgcggcgaccagcattttctcaaccaaaatgccggattgaactgcaccgccgcaccgatctatcggccggatggccgcattgccggcatactggatctctccgcacccgcgcagcgcccgtaccgcgatgcacagcgcctgatcatgcaggcggtgcggcatatcgaacaccgctgggtcagaagcgcgatcgccgaccgccactggacgctgcgtctgcacgccgatgcccgctgcctgggcagcgcgcaagagctgctgctggtgtttcacgacgaagtgctgatcgccgccaatcgactggcgatgatggagttccagctctcgtcggcctcattcggctccgttgagttcacccagctgtttcccgacctgttgcgacagccttccggggcaccgcgccagacgctggccggcaatcaacagcactattattcgttgcttgaggcgccgcagcgccgcgtcagcgctctgcgttctgcgccgccggcggaacggcacgacgagcagcatcagaaagcgctgcgcattctcaacgccggcctttcgctgtgcgtgaccggcgaaaccggctgcggtaaagagcatttcagccgccgcctgtttcaagagagccgctggcgcaacggcaacttcgtggcgatcaactgcgcggcgctgcctgagccgctgatcgaatccgaactgtttggctatgcgccgggggcgtttaccggcgccaatccgaaaggctacatcggcaagatccgcgaggcggacggcggcgtgctgtttctcgatgaaatcggcgacatgccggcgggtctgcaaacgcgcctgctgcgggtattacaggaaaaaacggtcaccccgctcggcagccgcagcgcttatccggtcgagttcgcgctggtctgcgccacgcaccacgatctgcatcggcaggtagaggcgggggcgtttcgcgaggatttgctgtaccgcatacaggaatacagcctgcgcattccgccgctcagagagcgggcgcagctggaggccttcattttgcagctgtggcgagagctgggcggcgagcggcgcgacattcgtctgttgccggaggcgctggcgatgctggcgcgctatccgtggcccggcaacgtgcggcaactgttgagtacgctcaaggtgctgctggcgctggcggacgatcatgcggtgcttaccctggacgatcttcctcagtccatcgcggtgctggcgccgcggcaagagaacgccgataccgatctgggggcgctgcaggcggcgatcgacagggcgggcggcaatctcagccgggcggcgaaggcgctcggcgtttcacgcagcacgctgtaccgcaagctggggaggcagaaaacggcggcggaataaggcggcgcgattgagcggcgataaggccccgctgcgcggggcctgttgctctctcaatcccccagccccggcgggttaatctcggaatgggcaatcttctcgtcgctctccgcccagcgatccagcacctgcagatagctgccgttggcgatggcgctgttgagcgaagcctgcaccgcgtccaccaggccgttgcctttcttcagcgtgacggcgatgttggcggtcttcggccagccgccgggcacgatgcccaccagccgggttttgccggtcagccgcgcctgataagcgccggaaacgttgggcccgaaggtggcgtcggcgcggccggactgaatagccagcgtggaggcggccttgtcggtgacatacaccggctgcagcggcgccagccccttggcgcggttctctttgtcccaggccagcagcaccgcttcctgattggtgccggagtcgacgatgatctttttaccggcgatatccggcgcggttttgatctgggtgattttactgtcggatttgacgtagaaacccagcgtatcctgccgataggtggcgaaatcgaatttggtcttgcgttcgttggtcacggtgatgttgtaaaccgcggcgtcatatttgccggaggccacccccagcggccagtcttcccacgaggtgggcaccagcttgagtttcaaccccaaaccgtcggccaccaggcgcgcaatgtccgcctcgctgccaatcaccgttttattgtcgcgagcgtacaggccgaacggcgggccgctgcccagcagagaaatggcaaccgtcagcgtgccggattccacgaaccggaagccggcggggattttggccacggcttcggcactcttcaccgtgtggatcggcgtttcgttggcgacgagatccacgcctggtgcggcagcggcggaaaaactcagcagcgccgcaatcactatcatctttttgctatatatcattatgttaattaccttcattattatgggtgtcacacggtcgttgcactatctctaaaggcggcagatctgtgaacgaacaaaatcaactaaccaatcttggaaaaatcatgaggcgcctctggcggcgctgaatcgatcgaggatgcaccatgtcgtcgcgtttcgctacgttgggccgcataccgcgcggcgtgtgggtattgggtggcgtgagcctgctgatggacgtttcctcggaaatgatccatagcctgttgccgctgtttatggcgacgacgctcggtgccagcgtgatcgtcatcgggttgatcgaagggctggcggaggcgacggcgttgatcgtcaaggtgttctccggcgtgctcagcgattacctcggcaaacgcaaagggctggcgctgctgggctacgggttgggcgccatcagcaaaccgtttttcgccatcgcgtcgtcgtccggcatggtgatgagcgcgcgcctgctggatcgcgtgggcaaaggcattcgcggtgcgccgcgcgatgccttggtggccgacgtgacgccgccggaaattcgtggcgcggctttcgggctacgccagtcgctggataccgtcggtgcctttttagggccgctgctggccgtcggcctgatgctgctgtggcacaacgattttcgcgccatcttctgggtggcggcgatcccggcggcgctggcgattgcgctgctgtttttcggcctgaaagagccggccaccgcgataatccacaagcgcaccaacccgatcacccgcgccaacctgcggctgctggggcgcagctattggtgggtggtgagcatcggcgcgatcttcacgttagcgcgcttcagtgaagcgttcctggtgttgaaggcgcagcagggcggcacgccgctggcgctgatcccgctggtgatggtcgccatgaatctggtctacgcctgttcggcctatccgttcggtaaattgtccgaccgcatgagccatgaaggattgctgaaagccgggctgctggtgctgatcgccgccgatctggtattggcgctgagcgatcattggggcggggtgctgtttggcgtggcgctgtggggcgtgcacatgggcatgacgcagggactgttggcggcgatggtggcgcacactgcgccggcgcacctgcgcggcaccgcgttcggcatgttcaatctgatcggtggcgtggcattgctgctggcgagtctcggcgccggaaccctgtgggaactgttcggttccgcctccaccttttacgccggggcgatcatctgcgtggtgacgctggtcggcatgaagctggcaccgttcggcgaacggcggccgtgaaagcggcggcgctcaacgccgccgcgcggtttacgccggatgggcgtcattctcgttgccgccaatcgccaggtaatccgtgtagatttgcggcgcgccggagaacgacgccagtgttttccactcgtcgtacatgcgttcggtgtcctgatgctcggccacgaacctgagcgcttgctcggttgaaacatcgagctccggatggaacgcgttgagcgacgccagactttcaatgatcagcatcaccgcgtattggtccagccggttaccgctctggcccttcagcaggtgaaacttccagcccgggtagtcttccacgcggtggatgttgtcggtaatgaaccgttcaaactgctcgggcgagacgcccgctttaagcgccaggttatgaatgccgatgacacgctgaatgctttccttccctggttcgctgcggtaattggggccgggcggcaatgaactgcggctattctcggccaccagacggtaacaggtgtaaagggtcggcagttcggcgaaggtcgcgaaggttttccactcctcaatcagcgcggcggcctccggacgctgccgccaaaaggcgtgcgcctcgtcggtcagctcgccgttgccgtcgatatagcgcgcgtaggtggcggcgtctttagcctgataaaccatcaggtactgattttcacgctcgccgcgcaggccgcgcagcagcgtccatcgccagccgggataggccgggatggcgacgcctttacggcgaacgaacgcttcgaaacgatccgaggcgacgccccgtttcaggttgattcccacgtagtgcagggagaaaaccggcgtggttgatgcatgcattaaacgatcctcgcaagttaagttagtgagatgtgttcgtcacggctttggcgctgatgctgaccagcaacaggcacagcagcgtgcagccgaacgccagggccaggctggtgtaattggcgataaaaccgatcagcgccgggccggttaataagccgagatagccgaccagcgtcacggccggaaacgcctggccaggcggcacctgtttttgattgccgacggcgttgaacagaatgggaacaatgttggcgatgcccaggccggcgagcatcaacccgccaaaggcggccgatgccagagggacggtgacggtcaacagcacgcctgccgcagcgcacaggctgccgagcagcagagtgcggaagcgcccgacggcgccgatcagcctgtcgccatacagccgcccgcaggccacggcgacggcgtacagcgtgaacccgatccccgcctgcgatttggccacgccgcgctcggcatgcaggaataatgccgaccagtcgagcatcgccccctcggtcaggaacacgaagaaacagagcagggcgataaacaggatcttgccgtgggccagcgcccaccgcgcgccgccccgtcgctgctcgccgatgccgccgtgcgccagtaaatcgccggcgacgatcagcagcaggatcgcgatgaggagggcgatcaggccgatggcctgggccggggcgaggcccgccagcagcaacagactgacgccgccggcgccggcaatgccgccaaggctgtagaagccatgaaaaccggacattttcgcctggccgctctcccgctcgacgattatcgcctgtgagttcatcgccacatccatgatgccgttgacggcgccaaatacccccaatgccgcccccatcaacagcggagcatcgagtaacgccaacagcggcaagtcgatgcacagcaaggcgcctgcgcccagcaacacggcacggcaccccagtttggcgatcagataaccggcgaagggcatgatcgccatggagccggcggcgaggcaaaacagcagcaaaccgagcgcgccgtcatcgatgcccaatcgcgctttcacgaaagggatcaacggcgcccaggcagccatgcccaacccggcgaggaagaagatcgctcgggtggcgatttgccggcgatgattctctgcggcctcgccggtaagccaaggcagcatcatgacgatcggctctgtgcgacggacagataatcggtataaatctgcggtgaaccggaaaatgacgccagttgcttccactcttcatacatttgcttggtgtcgcgatgcgctttggcgaaggttgccgcttcggcggtggcgatatcgggctccggatagaacacgtccagcgccgccaggctgacgatttccatcatcaccgcgtactggtcgagccgattgccgcgctctcccttcagcaagtgaaacttccagcccggataatcctcaatgcgatggtgattttcggcgataaagcgttcgaattgcgccggggtcacgccttcgcgcagcgccagattgtggatgccgataatgcgcgcctcaggcggttcgcccggccgttcccggtagcgcgggccgggcggcacgtcgctttttctgttctcagccagcaggcgataatcgctgaacagcgtcggtagcaggctgtaggtgcccagttttcgccactcggcgaggatttcctgcgcggcggcatgccgccgccagaattcgtgcgcgtgcgccgttctctgcccggtggcggtgacgtaacgatcgcgctgctcggcgctgtcaatctcgtacagcatcaggtattgcccgacgcgttcgccgcgcaggccgcgcagcaacgtccagcgccagccgggataacaggggatatgtacgccttgttcgcgcacgaaggtttcaaactgttgtggcgtgacgccggcttcggtatcgatgccgatgtaatagaagctgaataccggtttgggatcggagactgtcgtcgtcatctttcactcctgattggcgaatgcggcggaaaattgggtattgataatggcttcgaccagcgtgacgccgatgggcgtgagcgtcacgcacgggccatcgacggtgaccagcgctttatctaccaggattttcaacgtgcggcggatgaccgggttggcaaacaggctgttgccgtcaaagcgccgtttaaacacccgatcgtccaccggcagcaaggtggagagcgccattttgaaggcgttcacttcacgctggatcggggagaaaccgcggctttcctcgatgggcaggcggtcttggttgagcgcttccttgtacttcttgtaaccggtgatgttgatggcttcggatcgcgtcgatttggagctgccgcccaaaccgatcgccacttccggatactgcttgtcgagatcggtgatgagcgctttccacttttccggctgttgatcattgcggtgaaaatacatggtggggtgttcggtatagccgccattcaggtagttctcgaccagctcgcgcatttggtactgtttgcccagcccagggaagcgcaggttgttgatgctgagcagcccctttttctgccacaggctttcgcgctcgcccgagacgccggtgcgatttttaataaactcatccatgtgcagcttggtgcagacgacgtgcgacagattcagctcgagggttttttccatgtcgtatttcacgtcgtccacgctttggcccagcatgccgtaaatgagatccacgctgacccaatcaatgccgagcgcgcgcgcgtgatgaatggtctccacgcactcttcggccgagtgcatgcgcccgcaggcggtgatgatgtcgtcattgaaggattgggtgccgaaactgattttgctgaagccgagctctttcagcagcgccagataggctttgttcagggtgccgggctccccttcgaagcgcagggtggcgttggtgaagttaaagtggctgaagtagaaggccatcatgcggcgcagttccggctccggcagcaaggacggcgtgccgccaaagacgttgaattcgccgatctccacttcggccaggctgggcacgcgcgccagccacatttgcgcctccttgatgttgaaatcgaccaaatcgcgaaataccgcctgagaggcgggcgccttgggattgaggatcaccgtggggtactgacaaaaatggcagcgatagcggcaggtcgggatataggcccagaggtggattttgcccgcctggcgaatgtcggcctccatatcggcaaaaaacgcggccagcgggtagtcgacgagatcgccggggaacacgtgacagccgaacggatccttatggacgtactccagaaaggcccggttttccggttgcaccaggaacgcgttcacccgcggcgtgggatagttttcatcgatatccagcaatgagtgcaaggcttcgtcgttcatcagaatacccctccgttgccgaaatagttgtgggcttcgccggactcgcggtcttcacagaagtaataaacaaagcgggtgaaatcctcgtctttgatcgtatcgaagcaggccggcaatgcgggcgggaagccgatatcgtcaccgacggcgcgccgcatggcggcaaacagcgcatcgcgaaattcgaggtagagccgataggcgggggttttgtaggcatggatcggtttgaaatcgatgatgcgcatctcgtgtttcagctcgtgaatgcggcggtagaggctgtcggccagcgaaccggagaagaaatcgcgcacttcgctgttttccaacagcagatacggattgagcagcaccggcagtaagatattctttggcgtgtagtccttgaccgagtagtcccaggccagtttcgcctccgccggcgtggcgtccgccagcgcggttttctgccgctcaacgtccggccggacgtccttcatgataatgatgccgtccttgccgtaggcgatgccgttgatcacctcatcgagaatggtgtccacccggcggctgttgatctcaacgtaagcatggcgagcgtaaaccggcttgccgccgtaggcgatgaccttaatgccgaagtcccagtcgtcggacaggtgttcgataaagcggccatggttgagctggtagaagatttcgatgccgcctaccgcgtcatacaggctgcgctccaccccgaaccctttgccgtcggggaagccgccgaacagggagaacgaaaattcgcgcagacgcagcgttttttggatctcgcggaacaggttggggcggtgctcaaactctgcgggaggatagtaatagttgcaggtgcccaggtcgccttgttgctcgatcatggtattcaccagctcgtaaagccaaaatgcatccacggtgcaatcggcatcggcggaaacgatatagtgcttgcgtttatttcccagccggctgtcgcgggctttagaacgcagcgacgcatagtccatgccgcgttttctggccgaggagacaccctgcaccgtttcggcgataacatgaatggccatagccggatgcctttcactaaacgcgtttattttagcgacggaatcatcggtggagttgttatcaacgacaatcagttcgtaagtgtcgtgggtgattaattcattcttggtgtgctgattgaacagcgaaagtaaaaccgcctcaatacggtcgctttcattataaacgggcagtacgacagacacaaaaacagtatcacgcatagatcctccaagggctaatgaaagtccacagttagaaatggcttgtctgaaaatgaaatgtcacgttattcgatgattagctgatatttaagaactccatgacgttgttggataaaattcgcttgcccagcgcgtaattcttttccgccacgcgcttcatctgctccttgttattaatgaaccggtagacttcctggatgaattcgtcgttcggcggcccatcctgtaactcggagatcggcatgacgggcgcttcaaacccatgtcggccgtagacttcgtgataatattcgtagcgagtggtgatatagcaacggcggcaactgatcgcttcaccgataggattgccatagctatcataatcatacgaggtgagaaaagagaccaggtcgcaagagtgatagaggtcctctatgcaaaacgtgtcgttttccgagcgcatatcgacatggggaagcatgccgacgaatttgacataggggagaacattcagttcctgcgccaatttggcgagttgcagataacatgacgggttttcatattcattgccggcgatcgccaaataggcgcgtcgagtgttgtggtcgcggataaataaatcattaagccggctgatcagcataatatcgcggtccaatcttttctgagggatgatgcgggtggttctggcaatgagaagatcattatcgcgaatattcatctgctttctgacattcgttctttcgtgactgtccgagaagtcataggtatttttctttacctcgacatggacatcatgattgcaccaggcctccagcttttgcttcagatcgtgattgagcgtgacataggtaatgtattttgaagggataggtttgatggcgtgagaataaggtggcgggccgtatttgagcacctttttttcgctgttccacatcaggtcatgatcgcgccagatgacgaaacgcgtcagtcgataacgtcggccataatcttcgatcgccagatacagcgctttggtatagatgatgttttccggcagcgtgccgttttccaccaccacatggctgactgcgagcgcttcccattgggcgacgaggcgatccgccagctgccgcgccgtcaacgcgatggtatgcaacaaagcggctttttcttgctcgtcaatgggcgttttctggccgatcaacgccgcgtgtgcgtagtcgagaaaggcggggtggtaatctggaatcgacgtgatgtcgtccaggcggaccagcgtaaagacatcgcggtagatgtcatgctcatgctgatagggtttattaaagtttcccttatcaatcttgatgtcgtatcccagatcaagataagagcgaaatccacaggcttgcagtcgtttggcaatcttcattgcttccaccgtgatccccgagaccgagacggcatcgaacgaaatgaacattgcattcttctcttgcctttcgtgcatcgcagtacctcctgctattatttgtagtgcattgatttaaattaactatttcttaacaagtctccggtaacgttcccaattgagtggaaaaagaatcgttttgacgctctggaatacactcaaatctgacagaacggaagcttaaccgttcaaaaatgtaaagatacgtttatgctttgtgagggctctcacaaatattccggtgcgggaggcgtgaaacaagcagaggaaaagaggggggatcaaccccccgaatgtggggcatgcgatgccgatttaacgattcgccatgccgccttcggcaggctgaagtatcgcctgcagcaactcgggcacctgctgggactccaccgcccggctgaacagaaaaccctggccgatatggaaaccggcttcgcacagcgtttggcgctgctgctcggtttccacgccttcggcgatgatatcgatcgacagtttttgaccgagaatgccgatgctttccacgatcgccaggatcgccggttcggtgttcatgcgttgaataaagtcgcagtccagcttaatgcagtccagcgggtaatccatgatatggctgaatgaggagtggccggtgccaaagtcgtccagcgcgatgcggatacccatctctttgagcatttgcagcgcgcgcagtacgtatttcgaaccgtgcttgttgaacgcgtgttcggtcacttccagttcgatcaggtgatggggaatgtggaacttcagcagacgttgcaggaaggtttcggcgtagttgtcgcgtaaaaactcgatcggcgacacattcagcgaaataggccgtaccgccacgccggccgcgcgccagcgggcgatatcggcgaagactttcagctgcatggcttcgctgatcttggttgccaattcgtagtcgttgaacgcctcgcttaccgtcgccggcagctgtacgccgttttgcgggcagtgccagcgcagcagcgcttcaaagccgacgatgctgccgtcgatcaggcagactttcggttggtagctggggcggatgcagttgtcgcgtacgatctggcgcgcgtagttgagctggctggcgcgggcgcgcgctttgtccatcatcttgcgatcgaacatgtagacgccgccgcggccgccgtctttcagttcatacaacgcggtatcggcgcatttcatcagctccgaagcgtcgcgagcgtctttgggatagatggcgccgccgatgctcatgccgcaatgcagcgtcttgccgccgtgggtgatcggcgtctccaactgcagcagaaacttgttggcgatgcggaaaatatcctgctcgttttcgacatcgctgatcaccacggcgaactcgtcgccgccgaggcgggagacgaacgaatgcgcattcatgcaggcgctgagccttttacccaagacccgcagcagatggtcgcccgccgcgtggcccagcgtgtcgttcaccagcttgaagtggtcaagatccagcagcatcagcccaagcgactttttgccgtgcagggcgcgcttcatctcttgcttcagctttttcttgaataagcgccggttgggcaggccggtcaattcgtcatattcgctggcgagcaacagacgttgttccatcacgcgttgcgacgtcacgtcgcgcgaaacgcacaagatctcggccacggcgccgtgttcatcgctgaccggtgtgagaatgttgtcccagtgctgttttttaccctgcggcgtcacgctcaatccggtgaagcgcgcattttttccggctctgacgttgcgtagcgccttgctgccgcggcgacggatctcgggggacagcagccccagccagggcatgccaaactctttttgcgccggatcaagaccgagcgccaggctgccggagcgattcatgtggcgcagcgtgccgtcgtgattgatcactttgatgcagtcgacgctggcgtccagcatgtcttgctggatagagagcgcctgaacgttttgctggcgttgcagcatttgcggatggatgtcggtggcagtgaggtaccagctgggctcctgcgccatgccgtcctgacgggcgttaaacgccagcataaaccaccggtaggcgccgctgcgctcgcgcagacgggcttcgccggcgaacgaggagagggcaacgatcgcctggcgccattgcgcggccaggcgatcgcgatcgtcgggatgcagtgcatcgagccagtctgcggcggcgtgctcaccggcgatggcgccggtatagtcgcgccactgcttattgaagtaaccgccaaggcggttgccgaagcaaatcagacccggcaagtcgtctacgatttcgctatagagatcaatcggatttttgttattgctctgcttgggcaacagggtcatgcggtatttcctcggaaaattacccatattcttgctctatagcagagcctctttcaatatagtcattgccaatgaaaatgggaatagccagcgggcgcggctaagaaccagcctggtagcatgaaatagattacgcaagaacgcattaggaatactcctgttatttataagcccctcttatattgcatcgaaaaataagtgctccgaccacgatgttttactgtctgaaaaagtaatcaatattgatgtttcaatgtggcgaaatgtttagctgccatgctgttgttgcgctcggcattttgcttgcgctatgcaccaatactgaagaaatcctcgcttatggcggtgatgctcaccatttcatgcacgtttcaacaggcgccaaagcacggctcccgggcgatgacgagaaaagtgatgatataaatcaagaaatgttttgtttcatctgttgacactttgctgacgtgtgagatagcctcgcgaatgataatcattagcaaaactggatggtgtcgcaaatgcattcacgtaatgatccccaggtagcggttcggatgacaggcaacgttcataacacgagaccacgtctgctgtggtctctggcaacgagacaatgtatcgaacggccgctgtcatcaggcctcttgggcggcatcttcacttagcctcaaccagcagatctcagtattaagccatggccggatcaaggcggtctattatttccacgcatttttcgcggatatatcgcgatctcacggagttgcatacgttctcaatcatgggtaaggaggcttcgggcagttaaaattaaatttactctctgggtgtaaaggaattggcaaaaagaatggggcgtatcgggttaccgctattctcaggactttgattaaccccaagagacatttcggatgtcatattaatactagcttctttatggagaaagctatgggtaataccatgaatggaaacgaaacaggttgggacagtgttaacgatcttattcactaccatgagcgcgggaatggtttgacgatcaataataaaccgtcctatgacataaatgatgcggggttgcagatagcgcgcagcgataaaacctggaatggcgttcacgtcacgggcaaagatgcgacggtgacctattcattcccggattgggaatataacgaactgaacctgggccaccgctcctcagaacgcgatacggggctaagtgcgttcacgcaacatcaacaagagcaggcgaagttatctttgcaatcctgggccgatgttgccaacctaaagtttgtcgaagtggcatcggatcaaccttccaatattacttttgggaattatgagggaaaagggcaagcgtatgccttgaaaccattctcatataatggcaatgactacagaggatacaattctgatgggcaaagttggtataatattaagaaccattctgaaaacttgcatcctgagctgggtaattacggccgtttaaccattacccacgaagttggccatactctcgggttagatcatccgggaacgtataatgcggggcaaggaagcccaaattataccaaggcagtttacgccgaagatacccggcagtttagcgtaatgagttactggaatgaatccattaccgatgcggatcatggccactactatgccgctgcaccgctggttgatgatatcgcggccatccaacatctttacggtgccaacatgaccacccgaaccggcgacaccgtttacgggtttaattcaaatacagaccgagacttctatacactcaagggcagccacgacaagctggtgatgtctgtctgggatgcaggtggtaatgatacccttgatttctcggggtatagccaaaatcaacgtatcaacttgaacgaaggcgctttctccgacgtcgggggattaaaagggaatgtttccatcgctgccggtgtcaccatcgaaaacgcgatagggggctcaggtaatgacatcatcgttgggaatcacgcagacaatacgctcaaaggcggcgccggcaatgatgttatttacggcggggctggtcaggatcaattatggggaggagacggtaatgacatttttgtcttctctgatcttaatgactcgcctgttcaggcacctgatacaatttgggactttgagtcaggcaaggacaagatcgatctgtccttcttcaaccaaggcgataaaggcagtgatttcattcagttcgtcgatcatttcagcgggcaggccggtgaggcgctattgtcctatgatagccagaacaatctgagtgaactggccttcaacatccagggcggtgcaaatccagacttcctggtgcacatcgttggacaggctgacgtcgctgttgattttatcgtttaaaatggcaacggtgggcgatgatgcccaccgtttcacatgggccacctatgtataaatttattcttgtcggaataatattcttgttttcaggagtctctatggcaagcagcctggttttaccttccgccgaaacgctatccgggcagtggacggtcagtgataaatcaaaatcttgtgttgtgcagctcaacacggagagtgtggattcggctggcggctatagcctgaaattcttgtctgattgcacgcccgacgtattgccgcaagagcctgccgcatggcgtcccgcccccgatggcattgcgctgttggacaaggatgggctaaccgtacttttcttctctcaggaagacgatcattaccgtagtcaaatctgggctgagacaggaaaaatcttgaagagaaataactagccaacaacgccttcttatccctcggcctcggccggcgcttctgaacgcggtcatcaggtttcacgtcgctccgctcacgattttctgagatatcgttcccttggttattcgttgtcttgctgcgtttatattgcgtcgggtggacaccggcgcaatatcagccggcaacgaacagccgctgctgccagtgcaacagttgtgtcagcgtgattggcgcagcggcagcaatggtcgcgcgattttccaacgcaatctcccgcgcgcgttgcaacggctcggcgctgaggcgttgcaagttttgttgcagcgcctgttgcgtttgctccagctcaccaacgctaacgtgcgtcagctcatgatgcatctgctgcaagaattcgtcggttaactgccgcagctgttccgcggtgaacgtcggggattgcagcgcgaacagcaggccttcggcatgggtgcagcggtggaaggcacattgcaccacgtagcccacgttgcgttccacgcgcagccgctgaaaatagcgcggcgcgtaaagccgggccagcacgcgcagcgcccagcggccttcggcttcatcgctttgcagcgggtaaaactgcagcaaggcgtgttcggcgccgctttccgtcagcgtgacaggaggaggtaaacgcggcggcgtttgcggctcagccgttatggcgtaggggaagtcatacagcaaatgtgacagccgccgttttaactcgccatcgccgccgaccagggtggcatgccagtgtggcgccgttgccgtagagacgttcaacgccgccggcaattgggctaacaggcggcgaatggcgatatcgttttgttgttttaactgcgcgtggcgcaggtttctcgccgcctcgttgatgacggccgacgacggcgccgccagggcccggttcacgacgttcagggcgtggcagatcagcccgtgactgcccgccagctgcagcagccacacaccctggtggcgttcgacgcttaaatgtccctcccgatgcgctaactcggccgctccggggcgcaatgccgcctgcaaaccacaggcctgttcttcgctgagtgagccatgcgacgatgggcgtagcaacagcaccggctgcgcctcgccggaacgtagatgctgcagcggcgcctggccggccggcaagggcggtatcggcagcgccgccgaagcggagaaaaagcggaaaggctccgctgtaggcgtcagcgcggcgccgacgaaggggccaagggtcagcggcagcccttggatttcgcgcgtttcaccgcccccctcgggcagcacggccaggcggcggcgcggcgctgccatcagcatagcgagttgccgtgtccagtcgtcatgctgttccgtcggcggcagccccaatgccctggcccgcagctgatcgagcggcgccaaacggtgaaaatcgcggttcgccagttgcccgaaatgctcgagctggcccggtgtcagcgcgttcagggcctgcagccatgctagcaaggcgctttcgatatgggcggcctcagacgccgagccgtgattgacggtgaaaataaaactcagcagggcgctgttttcgccgcagcgggcataatccagacgaacggcgtcaccccacgcgtgcgcgcgcagccgtgccagcagcccgcctggggcatcgtccagcaataaacgctcaagccgtcgcagccagccgcgtgaacggcagtgcggcagggcaaacaccagccgcagctgcggcgcgccgggaagagacagcgtgtaatcttgtccggcggccagcggcggcaatgtctcgggcggcgtggcgctgcccgacggcaagccgccaccgtagcgctgtgccagcgcatgcagctgctcgagcgattgcgggccttgcagccacagcgtcatgttcggtgcgcggtaatagtggtggtgaaactgccgcaacgcctgctgcaatgcggaaatatcgctgccgaaagcggcgcggctgccgatatgaaagcgatgcagcgcgtcaaatccgctgaacatctgccgctgcgccgcttcgcagcgggtttcaccgtcggcgcgcagcaggcggtattcggcgtcgatgacctcgatctcctgggcgattgcctcagccgccagctgcggggcggcgagcatatcgctcagccgagccaacccctccgccagagggtcagcgcccacttcaaagaaaaacgcggtttgcgtggcctgggtggtggcgtttagccggccgccggccgcctgcgtccagcccatcagcccatcttgcgcgctgaagttcgcgctgccgcgaaacagcatatgctccagcagatgcgccaggccgggccaggcggcaggcgcctgaaagctgcccgcttcgatgcacaccagtgcggcggcgccctcagcggccggggtgcttatcgccctgacggccaaaccgttatcgagctgccacgaagcggcgagtgtcatcgtcagcccttgaagatcagtcgggagttggtctgattgcgaaagcgcagctgatcgataccgatctgcgagcgattcgccgcttcacgcgccgccagaatggtgccgtgatgcggcgatttgccgcacaccgggtcggcgttgtcggcgttgccggtcagcatgaccgcctggcggcggcagccgccgtagtcttgctctttctccgaacaggaccggcagggctccggcatccagtcatagccgcgatagcggttaaagccgaaggagtggtaccagatatgctgcagatcgtgctccagcaccgacggaaacgtaatcggtaactgacgggcgctgtggcagggtaacgccatgccttccggcgtcacgctcatgaagatggcgccccaaccgcccatgcagcctttaggccgctcctcgtagtaatccggcgtgacgaacagcaggttggccagtttgccgtcggcggccatgcgctcgcgatagcgtttcaccaccgcttctgcctcggcgatctgttcgcgggtcggcagcagcccttcgcggttcaggtgcgcccagccgtagaactggcaggtcgccagctcgacgtcgtcggcatccagctggatcgccagttcgatgatgcggtcgatctggccgatattatggcgatgcaacacgaagttgagcaccatcgggtagccgagcgccttgactgccctggccatcgccagcttctgctgaaacgccctggcggagcccgccagcgcggcgttcaacgtttcgtcgctggcctgaaaactgatctgaatatgatccagcccggcgtcggcgaaggtttgcagtttcttctcggtcaggccgatgccggaggtgatcaggttggtgtaaaacccgagatcgcgcgcggcggcgatcagctcgggcaggtctttacgcaccagcggctcgccgccggagaagccgagctgcacgctgcccatcgcccgcgcctggcgaaacacctcgatccactgcgcggtggtcagctctttttcctgcgcggcaaaatcgagcgggttggagcagtacggacactgcagcgggcagcggtaggtcagctccgccagcagccagaggggcggattcaccgccggcgcacgtggttcagtcacggaaggtcacccatttttgttcgtaggcgcgctggaaaaactccagcacgtcgtccgccaacccgtcggcgccggggaagcgggcgttcagctgcgcgatgatgccattcagcgtggtgttgccgtcgaccagctgcaagatggcggcggcgctgtcgttcagcttggccatgccttccgggtagaggatcacgtggctgttttgcaccggctcccattgcaggcggtagccacggcggaataccggggtatgttcagggttcagcgtcattacaccagcctctggttgtgccagacccgcgcggcggtcacgctgtggtaaggcgggcggttcagggtgtaggccatgctcatggcgtccagcatgctccacagaatgtccagcttgaactgcaggatttccagcatgcgctgctgtttttctacggtgtcgcaatagtccagcgccagcgccaggccgtgttccacgtcgcggttggcctggccgaggcggctgcggaaatagtcgtaaccggcggcgtcgatccacgggtagtgttgcggccagctgtcgaggcgcgactggtggatctgcggcgcgaacagttcggtcagcgagctgcaagcggcttcctgccagcaggcgcggcgcgcgaagttgacgtaggcgtccaccgcaaagcgcacgccgggcagcaccagctgttcagaaagaagggcgtcgcgctgcaggccgacggcctcgccgaggcgcagccaggcctcgatgccgccttcgctgccgccgtagccgtcgtgatccagaatgcgctgcacccatttgcggcgggtgtccggctgcgggcagttggccatgatcgccgcatccttgatcggaatgctggtctggtagtagaagcggttggccacccagccctggatctgctcacgcgtcgcttcgccgttgtgcattgcgatgtgatacgggtggtggatgtggtaataagcgcctttggcgcgcagcgccgcttcaaatgcctgcggcgtcagggggcgtggttgcgtcatggcgattccctacagttcgatgttcatgccgtcccagctcacttcgatgccggcggcggtcagactttgccgctctgccgagtcttcattgaggatcgggttggtattgttaatgtggatcaggatcttgcgtttggcgggcaaggcgctgagcagggccgccagcccgtgctcttccgccagcgccaggtgccccatgtccttgccggtgttgcgccccacgccggcgttggccagctcattgtcgcgccacagcgtgccgtcgatcagcaggcagtcggcgcggcgcagccagggcatcagcgcttcgtccggttcaccgaggcccggcgcatacagcaggccgaccccgcgcgcgatatcttcgatgaacagcgccacattgtggcccggcagcgggcgatcgcggtacggcgaatagggcggcgcgttgctgagcaatggaatggcggtaaagcgtacgttcgggcagaccgccgtgtgaaaaggttcgccgggcgttaccgggtggtgaatcaacccgccgttccagtgggagagcatgggaaacaccgggaaaccggtgctgagatcgtcatgcacttcaggggtgcaccagacgtggtgcgggcagccctcacgcagattgagcaagcccgcgctgtgatcgatctggctgtcggtcagcacgatcgcgccgatgccggtgccgcgcagcacgtcgggattgttcaattcgggcgaggccagcagctgatggcaaatatccggtgaaacgttgcacagtacccagtttttaccgtcgtcgctaacggcgatggaagactgcgtgcggcgcgtggcgctgatgctgtggctgcgaacgccccggcagttgtcgcagttgcaattccactggggaaagccgccgcccgctgccgagccgagaacttttatctgcatgtctgaaccagaaaaagagggaaagaaatgcccgcgcgaaaggcgggcagacgggcgattaacggttggaaatgtacagcgtcacttccagccccagacgcaggtcaacaaactcaggtttagtccaggtagtcatagcggtgctcctttacatgcatcgtgatagttcgagcccaatgagaaattttcgcattaggccggcccaatgttggcgaaatgtgacgaagatcgcaacctttaaagcgtaaccgggttattcaccccaggtggcggcgagcgcgttcagccagttgcgccaggtcagcttctccagcagccggttatcgaacccggcctgcgccagcgcttgcgtcaggcgcggcaggccggcggcgtcctccaacggttgcggtacgttgaccccgtcaaaatcagagccaaatcccacgcgatcttcaccaagtttagcgatcaaatactcaacgtgtttaacaatttctgttaggtcggtcgttgcactgtcacgtttaccgtcagcgcgcaggaaggcggtgccgaaattgacgccgactatcccgccgctctgggagatggcctccagctgtgcgtcggtcaggttgcgcggctgcgggcagagggcgtggacgttggagtgggtggcgaccagcggtgctcggctcagcgcggcggtttgccagaaggttttctcgttcatgtgcgagacgtcgatcatgatgcggcgctggttgcaggcgcggatcagcgcctcgccggccggcgtcaggccggggccggtatcgggggagccggggaacggcccgctgacgccggtgccgaaggcgttcggcagattccagaatggcccgatgctgcgcacgcccagccggtagaaggcctccaactgcgtcagctccgcatcgatcatgccggcgccttcgatatgcagcaccgcggccatttgccggttgaggcggcactgttctatctcggcggcggtgcggcagatgcgcagccgcccctgggaagcctgttccagctgataaaggatagcgatctgccgttcggcgatcgccagcggatcgaaggcggcctgcgcctcctccggcgtttgattacgcatctgggcgatatagctgaccgggggaataaataccgcgaacagcccgccgcagaatccgccgcgctgcatgcgggagaaatcgaggtggcccggcgtgacgcgggaataaaaggcggcgaccggatcgtcgtcatgctgtagccacaggttgagcagcagatcgttatggccgtcgaacaccggccagagagggggaagcgtcatgggcatttcactgagtcaggcatcgtgaatgctatgttctcccatcgcgcgagggggaacaaccctcaggctatgggggttttgccgtcggctggatcactcgacatcagcagggcaaaacttagtgacattgtcactattcgcaaagcggttcctgcacgcgttggcggcagacggccaacaccaactgccgcagccagcggtgatccgcctcggcgtccagacgcggatgccacatctgcgagacggtgatgggcggcgttcttaccggcagctcgaagacgcgcagcgggccatcggcaggttgagcctggaggaaagaggcgggcagcaacgccaacaggttcgaggcttgcgccaccgccagcgcggcgggaaagctcggcaccacggcggcgatatggcgtgccagccccagctccgccagcgcggcgtctaccggcccgaggatgcgcccgctgcgcgaggccaccacgtggccgcaggcggcgtagtcggcggcgccgatctcgcgctgctgcgccagcggatgtgcggttctcatcacgccgacgaagcgatcgcggaacagcgcctgcaggcgaatttccggccccatgtcacccagcacgccgatctccagatcgaccagcccttcacgcagggggcggtcgcttttctccggcttgggcgcaaagcgcaaccgcgcccgcggcgcctgttcggcagcggcggcgatcagcgccgggccgaaggcctcgacgaagccgtcgttggcgcgcagcgtgaaggtacgatccagcgcggcgggatccaatgctccctgcgccgggcgcaacacagcgcgtgcttcgaacgtcgcgtgccgcgcccgctcgcacagcgtttcggcatagggcgtcagcaccatatgacggccggcgcgcaccaacagcggatcgccggtggccgcgcgcagtcggctgagggtacggctcatcgccgaggggcttaaaccgagacggcgcgccgcgccggcaacgctgcccgccgtcagcagcgcgtcgagcgcgatcagcaggttgaaatccgggtcggtcatgcgtttatcctgtggcgctggaaatagggaaggcgtttgctgcagtatatcagcgtaagcgctgcgtctcctgcgattgatgagcaataaaaaagccgataacaaacgttatcggctttacaggcagggggacgacgttacgccggcagctgctgtgcggttttctcgaccagcgccagcaacagcttgatgtcttccagcgtcacgatcgggttcagcagcgtcatcttcaggcaggtcacgccatcgaactcggtcacgccgacgttggcgcggcccgattccagcaaggcgtcgccgatgcgctggttgaacagggcgacggccgcgtcgcctttcgccgccagctgcgccggacggtaacggaacagcacgctggccagctgcggctgcatcaccagttccagcgattcctggtcggcgatgtaacgcgccacctgttgcgccagcgtgacgccgtgatcgatgatctcggcgtattgcttctgccccagcgcttccagccccatccacagcttcaacgcatcgaagcggcgggtggtctgcagcgatttggagaccaggttcggcacgccttgcgcctcgtcgaactcggagttcaggtaggccgcctgatagcgcatcagctcgtagtggcgcgcgtctttcagcaggaaggcgccgcagctgatggtctggaagaactgcttgtggaagtccagggtgatagagtccaccaactccaggccgtccaggtagtcgcggtactgctcggagagcagcagcgcgccgccccaggccgcatccacgtgcacccaaattttctgctccgccgccagccgcgcgatatcgcgcagcgggtcgatcgcgccggcgtcggtggtgccggcggtggcgacgatcgccatcacctgctcgccgttggccttggcctgcgccagtttttccgccagatcgttcacgtccatgcgggcgaagcgatcggttttcaccagggtgacggactggtagccgaggcccatcagcgccatgttcttctgcaccgagaagtgggcgttttcagaacagaacactttcagcttgcgcagatcgcccaccagaccgtcctgctgcacggagtggccctgacgcgcgaagaacgcatcgcgcgccagcatcagccccatcaggttgctctgggtgccgccgctggtgaacaccccggcgtcgccgggctggtaaccgacctgggcgcgcagccactcgatcaatttcatttcgatcagcgtggccgacgggctctgatcccaggagtccatactttggttggtggcgttgatcagcacttcggcggcctggctaatcaccaggctcgggcagtgcaggtgcgccacgcattgcgggtggtgcaccgacaggctgtctttcaaaaagtactcgatggcgcgctcgatcgccgcctggttgcccaggccttgcggggtgaagtcgagctggatgcgctcgcgcagttcggcaacgcttttgccctgatacatctcgggctgttgcagccactgcacgacggcttcactgctctgtgcgatcgcctggcggtaagcctcggcgctgtgcgccgaggaagccagaatcgggtttaacttggacatcgcggttattcgctccactcagactggcttgacgccggcggccaacagcgcctgctcaaatttatccaggaaaatacccagctcatcgttggtgatcagcagcgaaggcagcagacgcagcacgcagccgttgcgcccaccgcgctccaggatcagaccggattcgaagcatttcttctgcagcagcgcggacagctcgccatcggccgggtagcagcccatgtgatcctgcgcttcgttcggcttgacgatctcgatgccgatcatcaggcccagaccgcggacgtgaccgatcaccggataacgtttctgcagctcggccagcttgcctttcagccactcaccctgagcggccactttgtcggcgaccttatgctctttcaggtactgcagggtggtcaggccggtggccatcgccagctggttgccgcggaaggtgccggtgtggtggcccggttcccaggcgtcgaactcttttttgatgcccagcaccgcgagcggcaagccgccgccgaccgctttcgacatcacgatgatgtccggctcgatgcccgcgtgttcgaaggcgaacagcttgcccgtacgggcgaaaccggcctgaacttcgtcgatgatcagcagaatgccgtgttcctgggtcactttgcggatgcgctgcagccactcggccggcgccgggttaaccccgccttcgccctgaacggcttccaggatcaccgcagccggtttacgcacgccgctttccacgtcgttgatcaggttgtcgaagtagtaggtcagcgccttgacgccggcttcaccgccgatgcccagcgggcagcggtattcatgcggataaggcatgaactgcacttccggcatcatgccgttgatcgccgccttcggcgacaggttgccggtgaccgacagcgcgccgtgggtcatgccgtggtagccgccggagaagctgatcacgccggaacggccggtgtgctttttcgccagcttcagcgcggcttccaccgcatcggcgccggacgggccgcagaactgcaggcaatactctttgccttcgccaggcaacagagagagcaggtaatcggagaaacgatctttcaacggggtcgtgagatcgagagtatgtaacggcaagccgctggtaatgacattttggatgctttgcaggacgtcggggtgattatgtccaagagccaacgttcccgccccggccaggcaatcaagatattgattattctcaacatcagtgatccaaacgccctgggctttcgcaattgccaacggcaatttgcgcggataactcctaacattcgactcaaattcggcttgacgcgccaaataggtttcattgtttccgtttaatgagtttgcaactaaagtatcaatacggactttatccgtcatcatatctctcctacaaccgaaggtctcaagacgcaacgattgaattaatgaattagaaaagtaactgccttgtgaaaagcgcgaccaatatatggctttttcgcctgggactcaatagccgattttgttttgaattgtttagttttttcttaggctcatcaatatgttgttgatttgttgaccgttggttttgccggcagaaaacaacatttctttaacattgcgtaaaaatccttttctgctttcctttggctgcttctttaatgcatttattattaaggtgaatttccgattaataacataaatagaaaatagcggcttattttcatctattcaccaccttaagtcctatagcggttatatacacaaaatttgtgatgaatataagcaatcgagcgttaaaagcgcagtacccagagtggtgatttcttgcagattttacgtagcgcgatcaaaacagcgggatttttgtgcggtgccggcatgtctgccggcgccgcggtcattaacgttgccgtaaccaggcatgatagcgccgcagagtgcggcgggtgcgccaccgatcgatgagcagcgaccacagcggggagtaacgcacgttgcgcgtccgattgcggctcagagcgtgcatgcggcgcttgatcagcgccatgcgggcgagcagcgtcagcgttttgtcgcgccattttaccggcgcgggcagcgcatgaggggcttcgccggtttgccaacggcgcggcagatcgggaatttccgccatggcggtggcgatgccgaccaccgcgacgccgctgttcagcacccgttgcgccaccgtcgggcgggtgatgccgccggtggtcatcaccggcatgcgggctactgcggcgagatcgcgggcaaaggtcaggaaataggcttcacgcgccagggtactgtcgtctgccgtttcgccctgcatcgccgggctttcatagctcccgcccgataactccaccagatcgaccggcagttcgttgagcatcagcaacacctgccgggcttcgtccggcgaaaagccgccgcgctgaaaatcggcggaattgagctttaccgccacgcaaaaacctggcgagacccgcttgcgcaccgcgcgcaccacctccagcagcaggcgggcgcgatttgccagttcgcccccccaacgatcgctgcgctggttggccaacggcgacaaaaactgagagatcaggtagccatgcgccgcgtggatctgcacgccggtaaacccggcccgttcggcggcgtgcgcgctggcggcaaagcgggcgatcacctcggcaatctgcgcttcgctcatggcttccggctgcgcgaacgctttactgtacttacccatggccatcggaatggcggagggcgcccaggcgttgccacccatgtcggccattacctggcggcccgggtggctgagctgcatccaaacctgcgcgccttcctggcgcgcggccttggcccaggtttcgaacgaggcgagcggcgtatcctgttccagcaccacgccgccgggtccggtcatggcgcggccgtcgatcatcacgttgccggtgatgataagaccggcgccgccgataccccagtggcgatacaagcgccatagcgcggggccgggcagttggccttcatcggccaaattttcttccaacgcggctttggccaaacggttggtcaggcggctgccgttgggcagtgtcagtggggtaaacatcgggtttgcgctcctgtcgcagggggaatggcgctatactaggtttaaagttaactttaaggtcaatagggcatgaagatcggagaattggcggaacgggccggcgtggccgcctcggcgatacgctactacgagcagcagggtctgctgcccaaagcggtgcgcggcgtcaacggttatcgggtgtatagcgaaagcgcgctggaacggctgcatctgattcaaattggccagaatctgggcttttcgctgcaggcgatccaacgcgtgctggcgctgcagggcagcgcttatgaggatgggttgatacagggcgtcgagacccgtctggcggaaatcgagcggatgttggtcacgctgaatgagcagcgagaagcattgctggcgacccgacttaccttgctggaatccggcgtggcggggttatgccaggtcaaaaatgaaaagttggccggtgcgtggccggcctgcacagattagcggcgtttaaaggcggagcgcccggcatataccgccgcggtgcccaattggtcctcaatgcgcatcagctgattgtatttttcgatgcgctcaccgcggcacggcgcgccggttttcacatggccggctcgcatcgcaaccgtcatatcggcgataaagctgtcgacggtttcgccgctgcggtgcgagataaaggcgccccagccgtttgcctggcaaagctgcacggcggcgaaggtttcgctcagcgtgccgatctggttcagcttgatcagcgcggcattagccaaccgttcatcaatcccgcgctggatgtatttcacgttggtgacgaacagatcgtcgccgaccagctccacctggtcgcccagggcgtcgctcagaatacgccagccggcccagtcgtcctcagccaagccatcttcaatcagcacaatggggaaatcctgtaccagccgctggtaataggccgtcatctgggttgcgtccaactcgaggttctcgctgcgcaggcggtatttgccgtcggcgtagaattcactcgaggccggatccatgcagatagcgatatcttctcccggtcggtagccggctttctctatcgcctgcacgatcagctccagcggctggcggtttgaggcgaccgccggcgcgaaaccgccttcgtcgccgacgccgaccgacaggccttgttccaacaggatttggcgcagcgcctgatagacttcactgccccagcgcacggcctcgcgcagcgacggcgcgcccagaggggctatcataaactcctgaaagtccgccccttgccaacgggcgtgcacgccgccgttgatgatattcatgcagggcaccggcagcaggttggcgccgatgccgcccagataacgatacagcggcaactgagacaattgcgccgcgaggcgggcggcggccagagaaacgccgagcagggcgttggcccccaatcgactcttgttctcgctgccgtccagcgcgatcagccggcggtcaatctcctgttgttggcgcacatccaccccgcgcagcgcctcattgatcgccgttttgacgctgtgcaccgcctccaatacgcctttgccgccgaaacggtgcggatcgccgtcgcggtgctccaccgcctcgcgcgacccggtgctggcgccggaggggaccgaagcccgggccacgacgcccgccgcgctcatttcgacttcgacggtcgggttgccgcgcgaatccaggatttctctggcggttacgttttcaatctcatagctcatgggtagtcacctcattctagggagttggcacatgctttatcagcacgtcgatggacaaatggttaatgaactcgaagccgaaggaggaaaagacgccgaacggacggttctgatggcctaacagcaacagatcgacgccttcgcgggcaatcagggcttcgacgtctttgaagcgatggatactgacaattgcgcgcacctccagggggattgagcagtcctccaccagacggctgagcatggccttggcggcgatcacctcgctggactggcgatctttggtcagcgaatcgctgaggtagtccagttcggcatagtcggcgctgatgtgcgccacggtaatgcgcgtattcatctgctgattgaggcgttcggcatgatgcaacagcagccggccgtcgcgttcatcctgcaccagcagtaaagcatgttggtagagcggcatgacttatctccctgcgttagcgatctggcgggttaaccacggtaaaacctcttttttccggctcgtcatgccgggcagagacacctgacgaatgtcgagcacccggttcggcgagaaatacagggtggagcgacggcaggtgatatcggtgaccaatagcgcggccatctccagcccggcttcctgcttcgcatgttcaagcgcctgttgcagtgcgggcaacagcggatcgatgtcgctcatggtccgcacttctatctgcgacagcagcagcgagacgctctggatgcggtaattcttggcgtcgcggtgcagcaactgcgcggcggattgccccgagagatcggttttggcggcgagcaggccggcggtgaaggcgtcatagtcgacatgagcaattgcgcgtaaccgttcggcggccaaccgatcctgctcggtggtggtcggggcgctcagcgcgacggtatcgctcaggatggcgcccagcagcagcgtggcctgggcggcggaaagcggcatcggcctttccgccgccaggatctgcaggatcacggtggcgcaacagccgacggcgcgaacccagacatcgggcgggttgcgggtgattaacgtgcccagccggtgatggtcgataacgccgaccacatcgctgtcgggcaatgaggccggcccttgttcgacgtcggtaaaatcgaccagccagactttacggtcacggagatcgcctttcagcagcggaggcgcttgtacgccggcggcggccagtatgtagcgggtttccggcgtcagttcgccaaggcggaaagcgacggccggtttgccgaggtgattgagccagtccgcgatcaccagcgcgctgcagatgctgtcgctgtcgggatttttatggccgaaaacgtaaagcggcatttcccgcgcgtcggcatcgggctggagtggaaaaggggtaaagcgtgagatttcattcatagcgactcctgacatacctgcctaaaaaataaagcgaagttgtatatcaggcgtcatcatccggttcgagcgaacgcggcggttgggaaaggtggaacaccatcaccttgtgaacgactgtagcgcagcgcggtgacaaacgcaacgcctggcaaagctggcgagaatgcgcaatcggattgatactgagtgagtctatgatggacaaggatatttgccgctaatcgacggaaacgctgaacggactcacgccggctatgccgggtccgtcggtgacacaatgggagacaacatgctcgaaccctgcttccccgaaaacgaagccgaacgcctgtcggtattgcattcgctgaacgtgctggattcaaactcggtggaaaaactggatcgcatcacgcggttggcggcgaaatacttcggcgtgaccatcgcgctggtgtcgctgatcgaccgggatcgccaatggtttttatcgcgttacggtctggatgcccgggaaacgccgcgcaatatctcgttttgcggccatgctatcttgcaacgcgaagcgctggtggtgcccgataccgccaaagacccgcgctttttcgataatccgctggtgattggcgggccgcggatcggtttttacgtcgggcagccactgctgtcgctcgacgggttgccgctcggtaccctgtgcattatcgacagccagccgcagccgttttccccggaacaactggctgacctgcacgatttcgctgccgtggtggaggagtatttgcagagcattgaacgccacgtctataccgaaaacctgaagtccaatctgcaacgctcggaagccctgttcgaacagaccttcgcccaggcggcggtagggatggcgctggtgtcgctgcaggggtattggctgcgggtcaatccgcgcatctgcgaaatgttgcgctattccgagcgcgagctgatggatcgcacctttcaggacattacctatccgctcgatctcaacaccgatctggaaaaactgcagcagctgctgagaaacgagatcagcacttactcgctggagaaacgttatttccgcgccgacggctcgatcatctgggtgcagctgacggtggcgttaaaccggctgcctaacggcaagccggaccatttcatctcggttatcgtcgatatcagcgagcgcaaggcggcggaggccgatctgttcgctctgcaacacgagctggaacaacgcgtcgaaatccgcacgcgagagctgaacgtggtcgtcaagaaactcaacgaagagattgaaacccgggtgctcgccgaatgtcagctcagtgcggagaaggagcgtttgcgcgccattaccgacaacatgccggccttaatcagccagatcgacggcaatgaacgctacctgttcgccaacagcgcctacaaaacctggttcgggctggaggagtccagtctcagagaaatgacggtgcgcgatttcatgggggaaagcgtttatcggatagcaaaaccgatgatcgaacgggccctcgcgggcgaaatggtgagtttcgagaatgagctccagacccagaaggggttgctgatgatccacaccacgctggtgccgtgtgaagcgcaggggttttacattctgtcgatggacattaccgagttgaagcggctgcagcagcggctggaatatgacgcaacccacgacatgctgaccggattgaccaatcgccgcgcgtttctgcgccggttgtcgggcacgctgcaggcctgttgccatcagcggcagatggcgctgttgtttatcgatctcgacgggttcaaaacccttaacgacagctatggtcatgacttcggcgacgcgatcttgaagacattcgccacattgctcagcgcctgcgccggcgagcaccacagcgtctcgcgcctggccggtgacgagttcacggtgatcctgtggccgttgacggatccgcggcgcgaagtcagcgaattttgcgaaaacgtgttggcgcaactggccaaaattacgcagatcgggccgcagaaggtacggctttccgccagcatcggcgcggccatttccccatgcggcgatgtgacggaggagatgctgctgacccgcgccgacggcgcaatgtatcaggcgaaatcggccggaaagggcacttatgccatctgcgagctgtgagcgtgcaacggtggcggtctcagggtaagctgttttttcttttcctgtgagcagaactccggatttattgcatggcgtcaaatcatcaacataccgactggcttgaactgcggcgcgatgacgaaaccggtatcgagagcgtcaacgcccactttcaggggcatgcctacgatcctcacgatcatgatgaaatgctggtgggcgtcacgcagcagggcttgcagcgtttcaattgtcaccgctcgctgcataccagccggccggggcgcgccatgctgatcgagccgggcgcggtgcacgatggccatgcgccgcaggccgaagggtttacctatgcgatgctttatctaccgcagcgctgggtctccgacgcgatgcagcgccgcggattgggggacgcctcagtgctggaaggcgctttccacagcacgttgaccgacgatccgatgctggcgaccgcgatacaacaggctttttttgcgttgcatcagagggaaggccggctggcgcgcgatcaaagcctggaccaactgctgacgcttttggcgcggcatatacgcgtcaggccaacgtcccaaagcgatgacgctttgattgagatgaatcgtttacgggactacttgcacgagcacatggcggataatcccagtctggaggaacttgcgcttcagtgcggcctggatcgtttccgtctgactcgccaattcacccgcgctttcggccagtcgccacatgcttacctgatccggctgaggctgcgtgccgcgcgactgttactggcgcagggggaagagccggcgcaggtcgccatgcaggtcggctttgccgaccagagtcatttgggccgctggttccggcgcgcctaccgtttatcgccggcggcctatcaacgccagtgcacaaacgttctataccgctgactcgctcatcgccgatgatgcgcttttaagagcacaacggagtaaagcgaaacatgtttgataccaagatggcgtttatcgtgcgtgacgatctgcaaacctggcagcggctgaacgtggtggcctttctggcgacggggatcgccgctgcggccccggagatcatcggcgaatgttacgtggatgcggaaggcagacgctacggcggcatttccaggcagccgatgctgattttcgccgcggatctgccgggcctgcaaaatgcgcatcgtaaagggctggaacgggaattgacgctgatcccctatgtgcacgccatgttctcgaccgggcacgatgaagccaaccggcaggtttttctcgctgaaaacgcggacaacctggacttggtcggcctggcgctgcgcgggccgaagaaagcggtggataaggcgataaaagggctgacgctccacgcctgagaataccgttaacgcggtgcgcttccaatacggcgcttaggcctggaacgtctgcagccaggcggcgaattttctcacgacctcatcgtcccgatcgcgcagcagcagggagtaaacgccggttcggatagtcaacgccgggaaaggcgacaccagccgaccggacgacagatgtttggcgcagaacaggtaaggtacgacggccagccccaggccgtcttcggccgcctgaatggcggcgaaggtatggtcgagcgtgagcggcggcggtgaggcgtccagcgccgtcgggtaggtattcagccagctgtgccataaatcttcccgggcgcgaatgcggatggcggtatgctcgccaagcttgtccggcgcactgaccggcatggcgcgcaaatagctctggctgcagaccagcaagctgtcttcctgcaggaaagggatcgccttcagcccggagaagtgcgcgggatcgcgccggatcgccacgtcaaacggcgtattgcgatcgacggcgccggtgctggtggtgatatcaaccgcgatccccggatgtatctcattgaatgccgccagctttggcatcagccagtgcatggtaaacgtcggcaggctgtgcactaccagccgctgccggccggcgctcgctttcagcgcgctttccgccgcaaacaattcgcttatcacccgagacgcggtgcgcgaaaaattctcaccggccggcgtcagccgcacggacttgtgtgcgcgataaaacagcgtgatccccagctgtgcttccaggctgcgaatatggcggctgaccgcgccggtggtgagaaacagctcatccgcagcggcgctgaagctgccaagacgggcggcggcttcgaaagcgggcaggtgcggcagggagtgaacttttttcataggttgagtttagctcaaccaaatgagggacgaaagatcgtttgtcagccgttgattttgctcactattatggcgcatccttcccgcgttgccgagtgcgccatgttaagtttcgtcccgtcagttatccgtgttagtcgagtcatcctcatccatcgatggacagggaggcggcgctgagatgcgagctttctttctgctttgcgtaagccgggcaggcctctgcctgggcaccatgatgttcgctggcgcgctgccgaccatcaggagcgagtggcagctcgacgccgcttcggccggcacggtgcagacggtgttcagcctgaccaacgccctggcgctgctggtggcctcctggtggtgtgattcgttgggcgcccgccgggtttatctgctgttctcctggctgggcgccgctgcgttgatgctgttcgccgtatttgcccattcttatctcggcgcgttggtgttgatggccttcgtcggtttgacgcagggcggggcttatacgccggcgctgctgttggcgatggggatgaacggtccggcgcggcgcggttatgccatcggcatggtgctggcggccagttcgctggggtattttctgtcggttttcatcgccggttggagcgccacgcgctggggcgccggcgtggcgttttcgctgtgtgccgccggtgcgttactgggagcgctggcgggatcgttggccctggtcggttatcgggaaccgcaaccgcgcacgctggggaggaagacgaaacgtgaaagctatgctatcacctacgcgaccctgctgttgctgatcgggtatatcgcccacagctgggagctgctcggcaactgggcctgggcgcccagcctggtcagcgaggcgttgagcggcttctctctggatccgctcagcgccggattgatcgtcgcggcggtgatccacctggccggcatggtggctacattgattgtcggcaccgtttcggactatttcaatcgcgcgtcggtgctgatgtttatgggcgccgccggcgcattgggttcgctgttgatggggtggtcggcggactgggggccgggctggacgctgctgctcgtcagcatcggcagtttcttcatcctcggcgactccggcgtgctgtcggctgcgatggcggacaacgtgccgccgcaacagcttggcagtgtgatgggctggcgatcgttgctggggttcggcatcggttcgttcgccccgttatcctttggcgtggtgatggataccacccacagttggggcgcgtcttacgccgtgctggcctgcggcggcggggtagcctgtttggcggcatggctgctttggcgacaacatttgaaatgaggtacgggcatcattaatgaatggaacatcatcacgcattattatcgtgggcgccgggattgtcggggcatcgatcgcctatcatcttgcgcgtcaggggcagcgcgttatcgtcgttgagcaggcgtatcctgcggcgggggccacaggcagctcgttcggctggatcagcgaaggcgtacctgacggcgctcccgacgcgtttctgcggcgcgagatcgtggctgactggatgcgcctgacgcaggagatcccggaattgtgggtgaattggtccggcgcgctcagctatggtcaggcaccggctacgcaaaaccccgacaatcggcgtctgtccttagccgaggtgatggcgctggagccggcgctctggcggcccgatagccaggcctattttgcagcgcgcgatggcgcggtcgatccgcaagaggtgacacagcggctgctcgaacgagtaggcgcgttgggcggcgagttgcttctgggacgtgcggtcagcggatttctgcgcgacgccggtgggcagataaccggcatcgttaccgatgagggcgcgatagccgccgaacgggtcgtgctcgcctgcggcacggggatctcggcgctgctggacggcagcgaattctcgttgccgatcgaggcgtcgccggcaattttgttgcgctatcacgcggcggcgcaggcggtgaacacgctgattgcgggcgacgacattgaagtgcgtcatgcgcaaaatggcgatctgctcgcggcggaggattatcccgctggcggcaatgtcaaacacgtggaagaggacgcgcaatcggcgattcaaagccgcctgcacggctcggcgccattgcagctgcagacgtgttcggtggggctgcgccccaggccgcgcgacggttatcccatcctcgggccgctgggcgccacctgtctctatgtggcggtgatgcatccggccgtgatgtgcgctccgacgctgggtcggctggtcagcgacgagctgctgcacggcgttaatcccgccattcctcgcggctaccgcccggcgcgattcactgatcgggctgctggataatttttccggctacggattaacaccgtaatgcgctcaacgttgcagcggttttttgcgccgtcggcgaggctcttatatatttattagcatgcctgaggcaggttaggcatgaaacggcggtcgatcgggccgctgcaagtacgacagttaatccgttcgccaagaggctgcgagcctgtgctttcggtagggacagccgccaatcgtttctacggcgaccgaaggcggagcagctactcaccggtcacgaggacacttaccatgcataagagaacactggcgtcactgcattacgaaaacatgccttacgatggggtacactttcacattttgaaacgggagacgcctggccatacggcgttgctgaagctggatgcgggcagccggcaaccggcgcgttttcatccgggctgggtgaaactgatggtgctgagcggtgaactgaaggttgacgatcagacgttgcaaccccatgagatgttgatcattcctgccaataccgcttatacggtacaggccatcacggaagtgatttgtctggcgatttccgagctggacggcgccgagttggcccgttgatgagataacaacgttggatggaggagagcctaggcgctctccctatcccttcagcagtaagccgtcccccaggccgagctacctgctgattgatgcgtacacctcctgattatgccaccgcgctttccctctccatcactttcggccgcgtcgcccccgcaacgagccgccatcgcgcagcgcatgcgcaacgtcatcgcctccgttttacgcagaacgatgaaattttggtgtaaatagtgagtttcttcgcataaggcccctggtgtggcttgcgagaacgtcactatatggaggatcatgcgctccctctatcaaataaaagacattcgcgttatcaaaagggacaaacgatcatgggattcgaagtcgacaacgccgaaacgaaacgcattgacctcagcagccacgaaaattcctcgttcgaggtgacggggctggtgaaacactatccggcgggcttcgtcattccttaccactcgcataaacgctgtcatttgctctattcgcaacagggcgttatggcggtcgaggcgagcagcggtcgctggatcgtgccgcccaccaccgcggtttggttgcggccgggggtagaacatcagatcgtcatgcagagcaacatctgcgtttacgggattttggtcgatgaaatcaccgccgcgcgtttgccgctgcgcgacggcgtattacaggtttcaccgctgttgcgagaactgatcgcccagttggcgacgctggcgcctgaagggggggagaccaaacgcaatgcgctgctcagagcgttgttcctggaggagctgagcctgcagccgcagctggcgctgcatctgccttggccggtagaggcgagaatggccgaaatttgccggcagttggtcatcacgccggccgacgaacgcggtattgaggcctgggccgattcactgtcgatcagcgtaaagacctttcaacgccatttcagccaacaaaccggcatcaccttcggccagtggaaacaacgcctgcggctgctgtcgtccattccgctgctgctggccggcaactcgatcatccacgccgccttcgaaagcggttacgagagtcacagcgcctattcggtggcgttcaaaaaactgtttggcgtttcgccttcgcgctttacgctatagccttatggcatagcgcgcttctcctatagattgaagcaacctaatgacgtataaagcaaagcagtcaacttccgaggccgcgtcccgtgataaaaattgtcgtgtatctgattctcgccgtgacgatcgccattattgcggcaagagtcctctttcgtttgccggatatttcgcagcgtctgccgcaggcggcgttgccggcggatcctgccgcgctattgccggcgcgagccgccgaactgatggcggcgcatcccggcctgagcggcgtggtgccgctggtcagcggccacgatgcattcgccagccgcctggcgctggcgcgaatggcggaaaggtcgatcgacgtccagtattacatctggcataacgatacctccgggcagatcctgctgaaaaccctgtatgacgccgcccagcgcggcgtgcgcgtgcggctgctcttggacgataacggcgtcgccatggacgagaccctggcggcgctgaacgcccaggaaaacgtcgagatccgtctgttcaacccatcaaccgtgcgcacgccgaagttggccggctacgcctttgactttatgcgcatgaaccggcgcatgcataacaagtcttatatcgtcgatggcgctgtggcgatcatcggtggccgcaacatcggcgacgagtatttccaggtcggcgacgaaaactatttcctcgatctcgacgtgttgagcgtcggtaacgtggtggcggaaaccgccgaggtcttcgatcgctactggaacagcgcttcggtgtttggcgttgagcaaattatccgaggcaaaggcaatctttctgctttcctgacgcaggccaccgcgactgaaagcagtgaccgggcccgcaaactggcggtgcagctggaaaccagtgcggtgcgctttcgcgatggcgccgtgcagccggaattcacccaggtcgagctggtggccgacgatccggcgaaagggttgggtaaggcttcgcgcgatcgtttgatggtgacgcagctcagcaagatcatcggcggcgtcaaccagcagttggagctggtttccgcctatttcgtgccgggccgggaaggggcgagcttttttgaatcgcttgccaaacaggggaaatccatccgtgtgctgaccaacgcgatgaacaccaccgacgtgctggtggtccatgccggctacgccaaataccgacgtgagctgctgcaggcgggggtggagctgttcgagctgaaattgcgcgccggccaaccgacggggcgcaaggaactcaaaccgctggggctgtccggcgcagcgctgcacgcgaaaaccttcgccatcgacgataagcgggtgtttattggttcgttcaatttcgatccacgctcggcgcacctgaactgcgaaatgggctttttgatcgacagcccgacgctggcggccgacacccgccaactgtttgatggcccgctcgagtacgccgcctatcggccgacattgacgcccaagggcaaaatggtgtggaacgaagccttcgaagacggccacaccgaggtgcaccagcaagaacccggcgccggctgggtaaaacgcatcgttctcaccgtggccggctggctgccgatcgagtggatgttgtaatggcggcgaatgccgccgacacccgttaagtcaaccgttgcaagggaaccaatcctgcgcttatcggttggcttcagcatcaccagagagtttaaaagtaaacaacgctgtttcattaacgctgcctggtatccagcagctgcgtgcgatagcgcttttggtgtcgcgatagaactccggggtgcccgttagtacgatatttctggctttacccttatcatcaacatcaaacgttgcgctcacttcgccttcacgtttttcagccttcgcagaggcggaatagtatggccgctcataaaagacttggccgtcgcatcccagattaggtggttgctttgccgctggaacattgctgcctgcacgccaggcatagacacaatcgttcaccgcaccggctttttcacagccatcaggttgcaatggcgcgcagccggcaagtgccaggctcagcgggatgaggatgaatcgtgacatggcgtttcctgcatgttctatcaatcagataacgcatattttcgcttagcgcagggtatttagaaagagaaattatgcggctttcgctagggtgttaaccattcttttcttaagcgatgctctactcgaaaatatgaaggtaaatagtttgtcggggtggggttaattcttcggttaattatatttattattttacttcgctattggaactattgatgaaagtgattacttcacaagaaattaaaatagaaaaaataaccgttttgattattctttcttgtaattacctcgacagaaaccaaaggatcttccaccatgcgcatgatgaaagccgccgcctttatcgacagggggagaatagaactcattgaaaagccgattccttctcctggccccaacgatgctttgctcaaaataaccacgacgacaatctgcggtaccgatattcatattcttaagggcgaatatgccgtgcctcacggattgaccgtgggtcatgagccggttgggattatagaaaagctcgggagcaatgttaaaggctttaatgaagggcagcgggcgttggccggcgccatttgcccctcttttacatcctatgcctgccaggatggatttcctgcccaggacggagcctatttgccggaatgccgttgccacggatataaagccacggcgggttggcgcttcggcaatgttatcgatggtacccaggctgaatatgtactggtgcctgatgctgaagccaatctggcgctcataccggacggtctgacggatgaacaggtgctgatgtgcccggatgtgatgtctaccggttttaaaggcgcggaaaatgccaacattaaaattggtgacacggtggccatcttcgcccaggggccgattggtttatgcgccactgcgggcgctcgtctgcagggcgccagcctgattattgccatcagcagctctcccgaaaagctgatgatggcgggaaagatgggggcaaacgtcttgctgaattacaaggaaaccgatgtgattgatgaaatattcaagattacggcggggcgtggtgtggacgccagcatcgagtgtttggggacgcaagccaccttcaatcaagcgctgcgggtgttaaaacccggcggcaccttatccagccttggcgtttatagcgaagacctccatctgccggtgagtgcacttgcctatgggttgggcgatcatactattcgcacggcattgtgcccgggcggcaaggagcggatgcgcagaatgatgaacgtcatccagcatggcggtttggatctcagaccgttcgtgacgcatcgctttcggctggagaatatcgcagaggcctacgcgttgttcgcggagaaacgcgatggcgtgattaagttggccatcacgccataaagcccagcgatacggttagcggcggattattccccgttatccttgagactgaccgtcgccgtgcggccggcgatcagctggacgccgtggggaatggtgtcgatcgcgatgcgcaccgggatgcgctgcgccagacggatccagctgaatgtcgggttgacgttggcgagcagagtgccggcggcggtggtgcgctcgctgtcgttgatgccggcggaaagcccgtcgacgtggccgtacagcggctgccgttcccccatgatgcggatcaccaccttgtcaccgttctggatgcggcccagcttggtctcttcgaagtatccggcgatgtagaaactgttggaatccaccaacgccatgatcggctgaccggcggtcgcgtaagcgccggggcgcagggagaagttggtgatcacgccatccaccggcgcatagagatcggcgcgctgcaggttgatgcgcgccagcgcccgatccgccagggcctgatccagattggccttcgccagcgattgggcatcgcggcgattgtcgcgttcctgttgtgaaatagccgactgcaacgcctgataacgccggttttcgcgctgggatgacgccaactggacgttggcgcgctccacggcggcctcggcctgatccagcgcgttgcgcagccgtactttgtccaggctgagcagcagctgccctttatgcaccatctggttgtcgtgaatgtgcacggcctccaccttgcctgaaacgtccgtggccagcggcaccacgtcggcgcggatcttgccgtcgcgcgtttgcggggcgtaggtgtaataaagataaagctgccacagcacacctgccgcgatcaaaacggcaatcagggtcagcgcggggcgtagcagagcaagggtacgttcacgaaacatgggggcctcagggggtggtaagccatttcaggccgtggaaaaacagcccggccagaataagaaacagggcggtgtcgaacagcgggcgctgcgcgacccagcgatagatgcccaccgcgttgagcgtccaggaaagcgccatgcgcgagaagaacgcgcacaccaggcacagcagcaagggcgagatgaatacgccgtcaatgttgatttcaccgatcatgtcagggattccagtgcaaagccgtggggaagtgcagcagccgtagccgggtaagtggccgcagcgcgcgccgatcgttctgccgccaggcctgttgcagaccggcgtcgatctggcccagcagctcggagggtgcctcggcgtgcagagaaagttggcggaacgccgccggcagaccggcgttcggcgaagcgccaggagtgagcccgccggcctgctgcagacgaatcaggtcgataccggtttttaagcgcatcaacagctgtgggctgcgatcggcttgcccaacgacggccaggcggctacccagcgcggtgatgcgatccaacgcgcgggcctgatagcgctgtaagtcgcgctccgtgatgtggcgattgaggcgcagcatctcttgcgcatcctgccgcatcagccgcgctactacttgatcagtgccccagcgccggaacagcgcggcgcacaggaatgcgaaatagacgccgatcagcgtgccggtggtgctttccagatacaaccccatattgttcggcgcatagtgcccctgaaagttgacgttgctgagcgacagggcgatcgccaacgtcgccaacgggttgctcgccgcccacacgccgagcggcagcaaaaacagccccatcacgatcaggaaactgccgtaatccccggccagcggcagcagcacatagctgagcagggcgccgaggaccatagcgatagtggcgaagcggccaaaagtggcgatggtggcgccgggattgtcgccggcgccgaagaaggcgatagccacgatccccatcagcaccatgttggcgccctgttcccagccggtgaaataccagagaccgcacagcagggcgtaggtcgtcaaaattccggcgaacatgcgcaccgccatgccggtatccggcggcggcgagaagacgcggctgcgcatcatctgcgcctgcagcgccgcgggcagcggctcgccgtccaggaatgcgttcaactgctgtacctcggcccacagcgttaaccactgctcaacctgttcagccagctcgtcgacgatcagcgtttcccacggcgacagcgacgctgcgggtggcaacaagctcaccgagggggcagcgtgcggtgcgggttcaacggcctgccgccggacctcattcagccacggctgtaggcgggggcgcagaccgaccggcagtgcggcgatgctgctgccgatggccgagagcagcggcacgatttgcagtacgcgttgctgtatcgaaatcgccgcctgacgggtgggcttatcgaccgaactgtcatagccaagggtggtcatcatctgattgaacgaggcgatgtcgcccagcaaacggatacggtccgcgtcggtctgggcgtcgccgcccttaccgtcgaggctgtcctcctgccaacgcgctaggtcagacagccaggctttcagccgcgtgcgcagcaccggctccagcgacgatgggaacaacacgctgtctaccagcgtcaccgccaaaatacccaggcagatctccgtcacccgcgtgacgaccatggtgaacatcgtgtccgggtgattgatgtaggcgatagcgaccagcatcatggtgatggcgcccagctggaaaaagtaagcgcgcggcgtgcgatcgagataagagaggcccagcatcagtgacgatgacagcccagcggcgacgatcaacagcaccggcgtgttgctaagccaggccgaaagtcccagcgtcagcacgccggcgaacagcgtgccgcaaaaacggtaggtggcgcgggcgcgtacggcgccgctgaccggattgctcagcacgcagcaggtcaccattgcccaatagggattttgcaggccgatgctttccgccagcgcgaaggccagcatggcggaaataaacagtttcacggcatacagcagctgcggtttaccgattctcatggctcattgccggcctgttgcagatagtggcctgcgcgctcttcaaacaggcgcagaatgcgcgtggcggtttcaatatcttccaacggcacgtcgtgcatcagctcgactcgcagcttatcggccgcggtttcgacctttttagccagctcggcgccggcgggcaaaatgcgcagggttttaaaccgacgatcgccggccgactcctgccgctcgaggaagcctaacgcggcggcctgatccaacagacgcaccagcgcaccgggattgacgccgacttcttccgccagatcgcgctgattgatgccctgcggattgcgatgcaccagaaccacgacggtagccaacgacatggagatgccggatttggcgatcgccagcgtcgcagcctgtttccacacccggcgaaccggttgcagggcgttggtgagggcatagagggatttttctttcgatgacatgggatacctcggcaaacagtgtatataggttaaatggcaacagttgctttggcaattaattttaaacaatcgactcagagacagaaggcaagacatatgtgacgtcgtcacataaaacagaagggctacataggcagcccgtttgaaaggtgggtattacagcgcctgaacggggttcatcgcagcgccggggaaggccgtatcctcaccgcgttcacgccacggcgccagatcagtctggcgatcgccgccatgcacgccgagccggcgtgtaactcgacgcaggaagagctggcccgcatcgccggctattcgctcaacgttccaaagggctggttggtagcaccgccatggaatacctctcgcattggcgtatgctgcaggcggcagatcgcctgcgggccggtaaagaaaacgtcgcgtcgatcgcctactcgttggggtatggctcggaaagcgcgttcagcaccgtcttcaaacgggtgatggcgcagtcgccgtttcagtatcagcggcaaatgccggccggggcgagtgaaccggagtgaaagggggcgccgcggccgtagccgccgcgcctgaggctacctgctgatcgtctgctgcaacgcctgaacggaagagtcgatgccggcatcgaccgacatggtcaagtcttccatttccagcgacacccagtcgttgtaacccatcatgcgcaccaccgagaagaattccttccaccactgcagatcccggccgcagccgacggcgacatagttccaggcccggccagctacctcgtcgatcggtttggtctccagcagcccgttgatctcgacgacgccgcgctccaggcgcacgtccttgccgtgtacatggtgaatggcgggaccgagggcgcgggctaccgcgatgggatccgcgcccatccagatcaagtggctgggatcgaggttcaggcccaccatcgggccaacggcctcgcgcagccggaacagcgtttccgggttccacaccagcatggcgctgaagttttccagcgcaaagcgctcgacgccgcacgctttggctcgggcgaccagcgcctgccaataggggatcgccacctcattccattgatagtccagacagtttttcaccgtaggcggccagctgacggtataggtgatccagttggggatggtgtcatgcgggctggccggcggcaggccgctcatcatcacgatcttcttcacccccagcaggccggccagctccagcgtattgtcggtttggcgcagatgacgctgccccagctcgcccggatcgagcggattgccggagacattgagcgcggcgatctccatgccgcggctggccagcgcttcctgcagctgccggcgtttggcggggttggccagcagttcctcggtatccagatggggcgccggggaccaaccgccggtggtcatctccacaccgcgcacccccagctccagcagccgatccagcatcggttcgaagggtaaatggcccaggctgtcggtacagaacgaaagtttcatggtgctttccttattggtaattaacccaggtggcgccgttgtcggcggaacgaacacagttctcaatccagcgcacgccttccaatccggcatcgatatccggatagatcagcgcggccagcgtctgccgatcgccgcgctgactggcgctgatggcgatggcgaacttgaggtaaatattggcccaggattcggccagcccttcggtatgcagcgcgccgagccgctcttccgccagggcgctgtcgtctagatagggcatgccgtggtgcagcgtctggctgggccgcccctggatctcatagcgtaattcgccgggtgtggaatcactccattgcaggctggcgcgtgagcccaccacgcggatgctttggctgtccatcgcgcccgcgttgatggcggaggcccacatgcgcccgacggcgccgttttcgtagtgcatcagcaccatggcattgtcttccagcggggcgcgggaacggataaagctctggcgatcgcacagcagggaggcaattttcatgtcgggcatgaccagctgtgagatgtagaaggtgtgggtagagatgtcgcccagcacaaaggaggggccggcgattttcggatcgacgcgccacttttgcgcctcgaacgtgtccgcgctttcattggcgttgaagccatgggtgtactgcaattcgaccatgcgtatttcgccgatgtcgccgttcgcgatcatggcgcgcatctgcatcagcagcggatggcctgagaagccgtaggttacgccgacgatcaggcctttctccgccgccagcgccttgatttctcttgcctccgccgtggtaaagaacagcggcttttcacagatgacatgcaggccggcactcagcgcggcgcgcgtaatttcatagtgggtgccgttgggggtggcgatggtcaccacctcaacgccatcttcgcggttagcttcttgctccagcagctgttgatagtcgtcatagcagcgttcggcgggcacaccgagattgacgccaaactcacgtccgcgcgccgcgtcgatatcaaaagcgccggcaaccagccgataggcggtattgtcgcgcagtgcgccggaacgatgcttgtagcccacctggctgaggcggccgccgccgatcatcgcccaacgcagcgggcgagggatgcttctttcaccatttaacatgctgactcctgatattgtggtattgcactcgggtgcaaaatgggttgaaaagagagtggcaacggtttatttctggttcatctgtgcaaattgcgggtagttttctcgcgtcacggtggcataaggcacccagttgtaagactcggttttggcgcgatccaacatcgctcgggtcacttgcaccgcgccgatcgcctgggctttggcatcctggaaaatggtcaccgccaggtcgccatttttgataaattgcaggccgtcgggcgtgccgtcgataccggcaaccagtacgccgttctttttggcctgcttcagcgccatgatcgcgccgatggccatctcatcgttgttggcggcgatcgcatcgatcggtacgccgttcagcaaccagccggagaccacgtcgaccgcttcattgcgctgccatttggcggtctgtttctctaccacgttcaggtctttgtgtttggcgatcaccgcctccaccgcgcgggtgcgttcgcgggtttcttcgttggagagggcgcccatcaggatcgccacgttgccgcggtaattcatttttttcgccagggcctccatctgcaggcggccgctgagcgccgaatcggagccgacgtaggccgtcgcgccgctcagcggcacttcgggtttgcggttgacgaagataagggggatagcggcgcgtttggcggccgctatcatcggctggacgccttgcgtatcaaccgggttgaggataatggcgtccacgccctgattaatcagatcgtctacctgctgcacctgcagggcgacatcgcctttggcatcgacgaactggccttgcagttgttgcgtagccagttctcgcgccatttggctgcgcaggatggagacaaagttgagatcgaaattggccagtgccacgccgacctgatagctcttggcctgagcggtcacgacaaacagcgagcaggctaacatcaacagcagtctggtttttttcattacggtatcctgttgagaagagaggtgttatgtaaaaacagcgtttttgcaaccgggtgcaaatcagaagaaaaaacgacaatgagtctctgaatgccaccgtgaatgtcgactatgaataaaatttggtcaacaggggaaaggtgaaaacagcgcggacgatcacaaactctttacgttttgcacccggttgcacagcaaattgcaatcgggtgcaaaaacgatacataattgcagctgatatgccggcaggcgcttaggggatctgagcgagcagggtatagtttaacttcaccgaagcagggatcgacgcaaccatgaaaaaacaccacaaagccaccgccagcgacgtcgccgaaaaggctggcgtctctaaatggacggtatcgcgcgcctttacgcccggcgcgtcgatctcggacagcgcgcgtgatagcgtgttggcggcggcggccgagctgggctatcggccaaacctgctggcgcgcagcctgtcgcaaaaacgcacgcacatcattggcgtggccatcgacgagatgaagaacccgcattcgatgatgatgctcgatatggtcaccaaacagctgcaaactcgcggttatatggcgctgctgctgaacatcaccgcgggggaaaactaccgggcggtgatggcgatggccgatcagctgcaggtcgacggcattctgttcctggcgacggtgttaaccaaagagtgggtggcgatcgcgcaagatctgcatcagatcccgctggtgcaggtgtgccgcaatacggaaagcgaacacattgatgtggtcaatatcgacggctaccgcgccggcgaagagatcgctgcgctgctgatagaacaagggcatcggcgctttggttacatgaaggggccggacacgcaaagcagccatttactgcgcatggaaggctaccgcgacagactgatggccgccggctttcggctggatcgggtgctcaccgccggccactacgatcgccaacgcggtttccagctgatgagcgaatacctgcaggcaacgcaggaaagcgagcgggttgaggcgctgttctgcgagaatgacgtgctggcgctgggggcactcgaagcgctcaggcaaacggcgccgtcgtccgcgatggccgtggtgggcttcgacgatatcgatgaggccggctcagccaattgggcgctgaccagctatagccaacgcatcgaccggctggttgaagaagccttgaatcgcctgatcgacaatcgcgccacggcagacggcgcctggcggcacggggaattgcgggttcggcggtcgcatttgggagataaacaggcgtgaggctttttcttttggtgacagcgtcactttggaggtttgatgagagctcatcgcgatacaaagaaaaaactctatagaagagaaagtgttacatccaaagggtccatcgccagcggtggtgaataccgttggggacgccatggcaaacaggcggacgatgagcagttgccgctgcgtgaaagcatgcatgggcggatacaacatggcatggattacacgccgctatttcaatttctgctcagtaaagtgggccaaccctggaatgaagtacatagcgaagcggttagtcgattggacaaaccagcacccattttttacctggtggcgctgcaccgtaaaaactggcggagctatgtctgctgtggtgaatctagctattacagcggactgtgtgtcgatgaacgcgggatactgcagaaagtgaacccggcatttaccgcagaagatgtgccggtgagatgccgttgttgcacctacacgttcaacggggaactcgtgcccgtcacggaaaagaactggcagaagccttatgagaaggagtcctgggaataatcaggtctcacgtctcacgagtgtcattctggtgcagattgactgccggagtttgccagatttcacgtagcgcgatcaaaaaggagggtattttgacccattttgcagagtggcacagccaaatccaggcgcttgaggttgaactgcatcagccgccggtgcggcgcgatccgcggcgcgtcgcggcattgctgcatgaagactttgaagagattggtcgttcagggctgcgttatgacaaacgccaaaccgttgcggcgctggaaatggaaactgaacatccgcatatttttgccgaaggttttaagctggcgcaaatcagcgaaggcgccgtgttgctgacgtataaaagttttcagcgtgatgcgcagggccacgccgttcgttgcaccgaacgttcatcgatttggcttctgacagccaaggcaggttggcagatgcggtttcatcaaggtacgccgactaagggttaaactgagatgggggcttaaacataaaaaaggatatccgcctgataaagccttgaaggtgaggtgagaaaggacgggcaggataatcccggtgcgtatccagtaattcaatttaacataatatacattatgcgcactcatatgcaggtatgtggattataccgtccaggcctgattcatggggtttctcttgtagccaaccaggccagcgccaactgctcgtgccgttgaatcaattcgtttttcaaccggccataagtccactggattttgccggcagtcttctgctgcctggtatttgattgccctgtattgctgagaacatcataatgcttgcgcagataatctctgaacgccaaatgtcagatcgcctgttcacttccagcaataaatgcatgcacgtgatgcgtgcgtttgccgtttcccttgatgtcgtaacgcctgcaggcaatgccgttctcgctacgcggcgtatatcccatgtcacgcatcctgtcattcaagctatccaacgccggcagactttcaacctccagcaatatatcaatccttgggatcgtgatgatgcgcgctgatattttccactccaataatgatgaccgggcatggtttccaatggctcatacctgccggtattggccaaaaaccccctgcttttttgatcgcgctacgtgaaatctgataaaacgtggcggctacgatactgcagatttctcccaaacgcgtcatttaagcgggcagtatttgcacgccaaatgcgcattggcgcgcgtttcattgctttcggcgcccaccacggcgttggctatactgaatggaaacattcttcctcgctccaggagcctctccatgtttgatcatgtgaaatttggcgtcagcgactttgccctcagcaaagcgtttttcctcaatgcgctggcgccgctgggcgtaaaaatcgttgctgaaggcgagcccggctatggcgtcgaactttgtcccgatcggggtaatgtgtcattgtgcctgtttcaaaccgacgaaaagccggcgcacctacacctggcatttgtcgcaagcagccgtgagcaggtcgatgcgttctaccacgccgcgctaaaagccggcggcaaagacaatggcgcgcccggtttacggcccaattaccatgcccactactatgcggcatttgtgatcgccccggatggccataatatcgaggcagtttgccacaattcgatggactagtgattttttcagttaaaacagcatattaatcacgaggtaatgcattggatttaacataacgcaattgtgacatcgtcacttaaagttaccccgtcacgtcaatccattctgctccggtgatgctggccagccgctgcggcgcaattctcacgcctgagttatcgctgccgcctgccggaagcacttcactgtagctgcacaggctgcgatcgcagtaaactctcaccgttgccggtgcggcaaaggggcaaacgccgccgggcggatagccggtcagcgcctccacctcctccgtcggcagcatgcgtgcctttacgccaaagaattgcttgtacttcttgttgtcgattctggcggttcccgccattaccagcagcaccacgacgtcgtttacacgaaacgaaagcgtcttggcgatctgcccgccctccacgccaaaggcttccgccgccagcgccaccgttgcggtgttctttgccagcaccgtcaccgtcgtctccggtgcgtgctcggccagaaaacgctgaacgcgttctatgctcatgccctgcctcctgatattgctaagccattgataatgccgaagtgatggtttcggttttaacatcgcatgctaaaaatgagaatcaaaattgttcaaatcgatgaatctgaacaaagctttaaggggccaacgccttttttatctatcatttttcatggagataaccgtatgaccacgcaaacgacagcaaggccttcagcggccgcggtggccgtctatgaatggctcaatccgataccctacggattttttaccgcggcgctcatcttcgacatcatctatgcctgcgcggcgaatattcaatgggtcaatggtgccagttggctgatcgccatcggcctgatttttgccattattccccggctgattaacctggtgcaggtgtggttcggcagcggccggctacagggctcatcggtcaagctccatttctggctgaatctgttggccatcgttctcgccattatcaacgctttcgtgcatagccgggatgcgtatgccgtggtgccgcaaggcctggtgctgtctgcgatcgtggtcgcgctgctgagcttcgccaacattctgctggccgtgagcgcccgcgcaaaataaggaggttttcatgaagctatcatccatcgcgattgcgctttcggccgtgttggcgctggccggctgcgataacagcgccgtcatttcgccggaacaacaaatggggcctgatccggcgttgccggcggcgcaagacttcctgatgccgccgatgcaggtgccaaagggcgtgggctggcagcaaaaccagatgccgaaagtcgccgaaggcttaaaaattgacaaggtggcagacggtttgctgcacccgcgtcagttgcttaccctgcccaacggcgatgttttggtggtggaggccaacgggccgggcaccgaagcggtcagcacccccaagcagctgatcgccgggctggttaagggcaagtcaggtaaagggggaaaaggcggtaaccgcatcaccctgctgcgcccaaccgccgacggcagttgggaaaagcatgtcttcctcgaggggctcgattctccgttcggcgttcagctgattggcaacaccctgtatgtggccaacaccggcaatatcatgcagtacgcttatcagccgggcgaaacgcacatcagcgatccgggtaaagagctggccgatctgccggacaccatcaaccatcattggaccaaggccctgctggccagcccggacggtaaaaagctgtatgtcggcgttggatccaacagcaacatcaccgaaaatggcctggccgtagagtaccggcgcgccgccgtgttggaagtggacaccgcctccggcgccagccgcatcttcgccagcggcctgcgcaatccgaccgggctgcagtgggaaccgcacagcggcaagctgtgggcgattgtcaacgagcgtgacgagatcggcgccgatctggtgccggactacctgacctcggtgcaggacggcggcttctacggctggccttacagctatttcggccagcacgtcgatcgtcgggtgcagccggcgcggccggatctggtggcgaaagccatcaagccggactacgccctcagctcgcacgtcgcgccgctggggctgctgttctacaccgcgagcgctctgccggccgactatcgcggcggcgcctttgtcagcgagcacggcagctgggatcgctcgccgctgaacggctaccgggtcagctacgtggcgtttgaacaaggcaagccggtcggtaaactcaaagcggtggtcactggctttgtctccgacgacgagaaggaactctatggcgcaccggttggattagcggtcgataaggctggcgccctgctgattgcggatgatgtgggcaacaccgtttggcgcgtcagcgctaaataacgttaacgtgcaggttccgaagaacctgcacgtgacatagtcactcaatgctttgcgccaaccagaccgttcttcccccgcaggcgggatcttccaccacatgatcgaccacgcggaagccgttctcttgcagcaagcgcgtatactcctccggcgccaggctggagtgaaacagcggctggccttcgaaattgccgatcgccacgccgtctgcagggccgctggtgaacatcagtgcggcattcggcttggcgtgccgtctgaacagtagaaacatgcggcgctgatcgtcgcgcgccaaatggaagaagctgtcccaggccagcaggccgtcgaatcttgtcgccagattcagctggcgcatatccatctgccgccactcctgctgtggaaaacgctgccggcagcgtgcgatcatcgcctgcgcaccgtcgatgccggtgactcgatacccttgttcaataaaataggcggcgatcggcgcgccattgccgcagccgagatcgagcagccgtgcattggccggggtaagctgtaaaaagcggtcgagccacggccgctcaaacagcgtggtgggtctgaggcgttcccaggcggcggcatgttcgtcataaagcggaataatcgtgctcgccagttcttccgtcattaatattttccccgttatgttattggcgcagtaaaaatagcctttggccaaaattaacgcgcttatccgataatatattcatcaacaggccgttgaccagaaataaaaggttttaacatttcgacataaaccagtacaattccctaccctgtgttaacccttttttaggtcgattgtgtcgttaattcagccccatgcatcgcgaaatcgggccgccgcctggttagggatgtttgccattctgatgttgttcattgcgccggtgatctcgcgatccctggagcatgcgcgcgccggaagtgctggaacggccgtcatggcggattgcggcatggatatgccgatacatcacgagatgcactcgccgtcgcctgaacctgaaaaagccgcgcagccgctgatgcagcacggcggcggccaccacaacatggcgatgatgatggacgacagcgcctgcggctactgcgtgctgttgttgcatgcgccgctgctggacgtgagccacgccccgctgttctggtccctgccgctggcttcacgcccgccgccgatccactatctcgttcccctgtttgcccacgtcgttcacaccgaattacagccgcgcgcgccgcccgtctctttcctctgatttaacaataagcccattgccgttctctgtattgccgttgatcgcttcaacccggcggaattaattcgcccaatggttaatcatcgagacgacattattagcccggttatttccacgttcagggaattaaccccccgtatttaccgatggtgattttcgccaggcctccccacgcctgaataatccctcggccaagaacggaaaaagttagcttaaggaaagatgatgtttaaacccgtttataaaaagaacgccgccacccgcgccattaccaccgccatgccgctgttcctgctggccggccacgcggcgcaggcgcatcagcaccctaccgacacacaggttaatgatggcgacgtgatcaccgtcaccgcaccactctactctccgctaaccatcgtgacgtcaccgaaaactccgcgccagccggtgcccgccagtgacggatcggactatctgaaaaccattcccggcttttctcagatccgcaacggcggcaccaacggcgatccggtgttccgcggcatgttcggttcgcggttgaagatcctcaccgacggttcggaaatgctgggcgcctgcccatcgagaatggatgcgcccacctcttacatctcgccggaaagtttcgatctgctgaccatcaccaaagggccgcagacggtgctgtgggggccgggatcgtcggcgggcaccgtgcgtttcgaacgtgaacgcccgcgcttcgacaagccgggcatcaagggcagcgccagcgtgctgaccggctccaacggccgctgggacgagaatatcgacgccagcctcggcgccgagcaaggttacttgcgggtgatggccaacaaatcccgcgccaacgattatcaggacggcacccatacgcgcgtgccgtcgcgctgggacaaatggaacggcgatctggcgctcggctggacgccggacaacgatacgctgttggaagtgaccatgggccgcggcaacggcgaagcgcgctatgccggccgcagcatggacggttcgcagttcaagcgcgaaagcctgggcatgcgggtggaaaaatccaacatcggcgaggtgctggataagctggaagcgcaggtctactacaactacgccaaccacgtgatggacaacgtcaccctgcgctcgccgggcagcggcggcatgggtgggcacggcggccatggcggcatgagcatgggcggccatggcgggcatatgatgtcctccggcatgacgatgcagctcgatcgccgcaccgtcggcggccgcgtgatgggcacctggcagtggcaggacgtgaagctggaaagcggcctggacacccaaaccaacacccaccgcagcatgagccgcggcagttgggaaaaagacgcccagttcaacagctacggcgccttcagcgaactgacctggtccaccagcgagcaggataagctgatcggcggcgcgcgtctcgatcgcaccctggtggagaacttccgcaacggaggcgatgcggagcgttccgacaccctgccgagcggctttatgcgccttgagcacacgctggccgagctgccgctgatgctgtatgccggcgtcggttataccgagcgtttcccggattactgggagctgttctcgccgaagctcggcccgaacggcagcaaggatccgttctccagcgtcaagagcgagaaaaccacgcagcttgatatcggcgcgcagtataacggcaagcgcttcaacggttgggtctccgcttacctgggccgcgtcgatgatttcatcctgttcaaatacgatccgcacaacgcgcgcctcagccaggccgataacgtcaacgccaacattatgggcggtgaaatgggcatgggctaccagctgagcgaacactggaaaaccgacgccagcctggcctactcctggggtaaaaacaccagcgacggccgcccgctgccgcagatcccgccgctggaagcgcgcctgggcctgacctacgagtacggcgactggagcggcaccggcctgtggcgtctggtcagcagccagcaccgcgtggcgatcaacgaaggcaacgtggtgggcaaagactttgccgatagcgccggcttcggcgtgctgtccgccaacgccgcctacaagctgaataagaacgtcaagctgagcgccggtctggataacatcctgaacaagacctacagcgagcacctcaacctggcgggcaacagcgccttcgggtattcggccaacagcgcggtgaatgaaccgggccgcaccctgtgggccaaggttaacgtcaccttctaagccgttcaccgggcgatgggcaaccgtcgcccggtcacgcgatatgcgatccggttcttaggatatgagttttaagtttttcccatccggttaggcggcgattactatcatcctcaggttaatcattgcccggagggaatatgcaaaagatcactcgttttctggccctgctcggcgagctgatgatcgaaaaagccgaagacaccgcaccacaggctgcccagcctgacgatcgtgacgacgcgttgccaccgcgccttgagcgtggtgttccgctggccgaccgcttcctgttcatgtaatttcccgcgctgtttccgctcacactgaacgcacgatatgttcgcgcagccactggtgagcgggatcccgatgcgagcgttcatgccacagcatagtcatttcaaaacccggcactgccaacggcggtttgagttgctgcaataaagggtggttgcgcgccagccgctccggcaacatcgccaccaaatcggactgcgtcagtaccgagatcacaaatagaaaatgcggcacggaaagcaccacgcgccgcgtcagccccacgtccgccagcacctggtcggtgatgccgtagaaaccgccgccgtccggcgagaccatcacctgctccaattcgcaaaattgcgccagcgtcaggttttcatgcagcttagggtgaccgactctgcccaccagcacatagcgttcactgaacagcgtacgctgacgcagaccgggcggcgccccttcgcgggtgtgaaacgccagatcgatctctccctgttccgccagtttggcgatgcgtgccggcgcggtttccagcaccgccagccgggtgccgggcgccgccgagcgcaaaccgttcagcgcgggcagcacgatggtggattcgccatagtcgaaggcagccactcgccaggtatcagtcgccacggcgggatcgaacggcgtggccggcgtcaccgccaactcaagcgccgccagcgcctgactcagcggttcccgcagctgttccgctctggcggtcggacgcatgccgcgcgggccgggcagcagcagcggatcgtcaaagatcgcccgcagtttggcgagatgcacgctgaccgccggctgagagaaattgagccgctgcgccgcgcgcgtgacgttgttctccgccagcagcgcgtcgagcgttaccagcagattgagatccagccgccttaaattattcatggttatacctggggtaacagtaattcatttctaatataccttgtgacgccctaacctgcagctctcaccccaaggagtgttgttatgaatgtattgattgtttacgcccacccagagccactgtcgctgaccggttcactgaaaaacttcgccgttgagcgcctgacgcaggccggccatcaggtccaggtgtcagacctgtacgccatgaagtggaaagcggcgatcgacgccgacgacagcctggaaggcgcatcagggccccgtttcgatccttcgctggattcccggcgcgcattcgccaacggcgtgcaaagcgccgatattgaacgggagcagcaaaagctgcgttgggcggacgcggtgctgctgcagttcccgctgtggtggttctcgatgccggcgatcctgaaaggttgggtcgatcgcgtctatgcctatggttttgcctacggcgtcggtgaacattccgatacccattggggcgaccgttatggcgagggtatgttggcgggcaaacgggcgatgctgatcgtcagcgccggcgggtggggatcccattacgccccgcgcggcatcaacgggccgatcgacgatattctgtttccgatccagcacggcatgctgtattaccccggtttcgaggtgttgccgccgttcgtcacctaccgcgccggtaagaccgacgagacgcgcttcgccgatctgtgcgagcggctcgggcagcggctggataatctgtggaacgccgatccaatcccatttcggcgacagaatgccggggactatctgatcccgcagctgacgttaaaggacccccttgcgccggggcaagacggctttagcattcacctgaaatagcgcgagccgctccccttatcgcggcgctgacacagcgccgcccccgaggaggagtttggcgcccaatcccatcatgaccacgcccgtaaatcgctgctgccagaccaacaaacggggactgcgggcgagccattgccccacggtgccggaggccatcgcgacagagcccagtgaaaggatcccggccagcttctgaatggaacctaaaacgagcaattgcaaccaaaccggcccgttttctgggttaacaaactgcggcagaaaagcaaacatgaacagcagcgacttaggattggtcaggctgttaatcgccccttctttcaccgcctgccacccggtcatcatccggggtttcagcacggcatcggaacgctgccggcttaccttcagcatttttatccccagccagaccagataggcggccccaacccaacgcaatacgtccaacgccagcggataagtatgcagcaaggtggcgagaccgagcaccagcatggaaacctgcaccatgccggcgacaaaaaccatgccgaaaacattgagcagcgcgatacggcggccttggccgataccccgggccagcgtgagcatcatgtccggtccgggagacagttccagaagggtgagtgcaacaagaaaagcaataaacgtttcggccgaaggcatggggttatcaccggctaatcataggagacggtaatcatattcctccccggacattcgcaacagcactatcaggcgcatccggggcgtatcgttaattcagggcggcgagaaatgcccgatagccctgcgcgctgctgtccagctcgtgctgctgaacctgctctgccgccccgtccgaagcggcttccttgccgtaaaaggcaaagaacgaagcatagtcggcccgcacgtaaccggcggtgacttcaaacggccggaagatttcctccagcgagtagcgataacgcccttcacgcgcgtaatcttctgcgcgcacgcccgccgtgaccgccagcgccagtttcttgttctgcatcttatagccgctgcgggaaccgtaggcccagccgtggtgagcacgtcgtccagccattcctccctaaaatgggcgtgttaccgaaacaataacaccaatgttaacccgcaatgtccaagtcgccctttttcaggatggattgaatatacgtatttttgcaggcaagcgagggcaaattacctcggtcaacaatgccatcctgatccaatactatgatctcatctgagtaatcaaatgttgaacgccggtgactgatattgatgacgatagcgaaaggataggctgattttatgtttttcagcacttctctttcatttacaatatccagtgacgaggtgacttcgtcgagaataatgatctgtggctgcctgagaaacaacctggccaatgacaggcgttgtcgctgcccccctgacaaggtcataccattatctcctatcggcaaatctaacaattcggcaggatcgttatacggaatatcattaaattgagctaactgcaacgccttgagtagtttttcatccgatgcatgtgggcacgaaatttgtaaattaaagcgaagagtatccatgaaaatatagtcattttgcgatacatggaacattaacttagctcgtgctttgtcagacatgccatttgttggcatttgattaacatatatctcgcctgagtcaggcatgagctccccagcaatcagtttagccagggtgcttttcccagccccgcttggaccggtcaaggtatagaaacctggggatgataacgttaagtccatgttatggattgcattcgttccatttttttcatacgaaaacaggacctttgagagcgtcacagagacactttcaccttggacattgttcatcaccggatgatcatttcggggaggggtgcccatatcagtaataaacttatacagtgataccgtggatttttgcattgcggtatacatggagccgatattctcaaggggggaagccaatagcataatgtaggaagatatcataacaaagtgaccgagcgtgatatcttgactcatgacgcgataaaaggagagtaagaaagtggcaccaaaaaatagaatgcttaaaatagactcaatcagcaggaaccggaagtcagccttaagcaaggcctcatgtttctcttctattgagttgagtaagtttttatatctagaaaacaaaaaatcataagagtcacaaactctaacagcatctatattcttaacactgtctgtaattatgctgtatttttttaccgaggatgaataaaaatcggaatacaaagtaacaattttcgggttaaatttcctcttcgtccacagatagataacaaagtaaagtacgaagagtaatgcgacaaccacatcaccagaaatcaatattattgaaatactaaaaaacaactgcaggagcggaggtaacaaattatgcgagatatttctcagcaacgttgtcagttcgtccactgcttgattcaaccgctgtgtgacatcaccggtattctcatttgtcgtcattttatttgaagtaaacaaacttttgaaataactatctgtcagactaatgacaacattgttacgcaacgacgttatcaaaataaagttaactgccgaggatagcttttttatgctcatcagtgcaatatagctaatggcaagaccaatcaccgcaacggataaactgtacgcttttacttcgatggcattgaccagatatgacataattacgggttgcactgagaacatcagcgtggtgataacggatattaatacaacatagacaaactgccattttaccgtttggcttgatgaagctttgaagtacctaaacaaaaacaaaagtttttccatattggaaccttttattttttatagtatggcggggccccaccatactttgcaatcaacggtcagataaagtattacctaacagaccacctcacttaactcttagaggtagtccaaccgtcacccttaccgacttgcgtatccgtcatcgttgttgtcttgatcaaaagcagatctttttcagttaacataaatgctcctttgtcgataaattagctaaatagcatgcatttttcactgcatgctatttagatcacttaatgatgaaccatagagcagatgaatacagttacagtaaaatcggatgatgttatcccactctgagaacaaaaatgcctcgcgtaaactgagaacatacccactacgtgctgcataacacagctcggtgagagggatgtaatcagatgatatattattcagcatcatgttaaaaaaaagcctggatgcacgaccgtttccgtctaaaagcggatgagcgtgtacaaacataacggaaaaaacaatagacacaaacaaacagtgcgtatcatcatttttcagtgcatacgcacgtaaggaatacaatgacacactaagcattgacatatcaataaactcggtgtacccaccctcttcatcagggacggttcttatattcccctgccgaataatgttagactcatcttttatttttcgcccggcatcactgataaacccaatgaacgattcatcactgagcagtttatctataaaaacaggttctgcatgctgatagaaagaaaactctttacgactggtcgcgttttcactggggaatatttttggatctacatgattactaaggcgatgttgcaataattttaccctgtctgtttttattgcctcaatagcattattgaccatttgttcatatccaatatttgtcctctttatcaattgctgagtcttacccagtaatacaagactatccttgtgaagatgacttacatcaggatatgcgaacggttgtaatttgatgacattaccatttagaacgtagtttcccatgcttcctttctctctatcttccctaaaacacccagcataatttctttttttttcataaatgcttcatgtttgttaatgttttatttcccccatccttctggctcattagcgccaacttcagtacgaacgctctgctcagcgggaaaaaatctgcgtgctgcatcggcaccatttcgtacaagacgctcagttcgacgcttaaagaactggaaaaagatcggctagtggtgagaaaggagtatccgcagatcccgcccaaggtggagtacagcctgtccgagcgcgggcgttcgctgatcccggtgatcgacatgatgtgccactggggggaacagcaccggccggaaccgccggtgccataaggggttaattgtccgccgccgctgaggttgccggcgcgggttcatcgtgctcgaccaacgcgtctgccggccggcactggcgcagcgtgcgcacgctgcaggccaccagcacgcccaacaaggcggcgaacgcaccgaacgacagcacgctcatcaacggggtaaacatcttgcccagaacgccgagccccagcgcgccgatcgaatcgccggtcacgtcctgtgcggtgccgaggctgttcacccgccccagcagatggtccggcgtgttgctctggatcagcatgaactgcagaagtgaggcgatggcattggcatagccgtagcacaccagcgccaacagcgccggcgccagatggctgaacagccccagcgatgcgatggcggtgaacgcgacgatcgcggcggccagaatcagcacgccagggcgagagaaacgccccacccagccgctggtcagcgcgcccaacatcgcaccgagcggcactgcggagtacatcagaccaatagaggacgcgccgacgtggtaagcgtcctgcgccagcgccgggaacagcaccctgacggcgccgacgatgctcatcaacatccccagcaacaccaccgagccgaccaccttattgtgccagacaaactggaagccgctggcgagcgcgcgcagcggatgttccggctcctgctgctgcggcagcagcgtcggcaagcgcaccagcggcacaagggtgcccagcgtcccggccgccgcgacggcgaaagcgagaccgacgccgccgaacacgatgataatcccgcccagcgccggcgccaggatcgcgccgatgcgcaccgtcaccatgctcaaggcccccgccgccgccaggttttcacgccccaccagcagcgggatcaccgccatcagcgccgtcatgcccagcgcgccaaagaatccgtcccaggctgccagcaggtagagcgcccacagcgacggcgccggggcgaaggcgttcagactcagggcgacaaagcccagcccgcaggtgccgcgcgcgaacaggatcagcttgcggcgatcgtagcgatcggcgagtaccccgcccagcatcaggccgataaacatgcctgcgccgtccagcgccaccgccacgcccacctgcaacgtggagccggtcatcgcctggatctgaatcggcacccccaccgccagcatgccgagggaaaacaccgacagcatgcgggcgcagaaaatcgcacgaaaatgcgcattgcttctcagcaaactgaaatcaagaaaaaaagaaggtctggccatagtgtcctgcatatcatgttttagtacgggtcgtggcgcacgccccggcccggttgcgttatatcaacccgtattgccgcgtcagcagcgaatgtaatagcggcccaagcgtctccagcgaggccggcgacaggatgtctgcgtgctcgcagccttggtgatggcagatcagcccatccagatacggcgcccacacggcgttgatatccatctctggcggcagcgtccggtcggcgacgaacagcgtcgccgtgccgtggaaacgctgactgcgcgcctgagaaagaaggcgcaccgcgtcgcggtagttggcgacaatgctgtcaaacatcgccgccttctccgccatcagcgccggatcgccatgatcttccgccataaactcggcctgctcctgcgccacctccttctgcgcctcctcctcggtggggccggtccagtcctggccttccggcggataggtatccagcatgccgaggaacgccacctcctccccctgctgctgcagacgcgcggccatcgaatgcgccagcgtgccgccgagcgaatagcccagcaggtagtaaggcccctgcggctgcaggcggcgcagagtggcgagatgacgatcgaccatctgctcgatatcctcgcaggtggcgatggcgccatccggccttggcgactgcagcccgatgatggggtagctccccggcagataacggctcagccccgagtactgccaggcgaaaccggaagccgggtgcagacagaatagcgccgggccttggccggcccgcagctgcaggcattcgccgatgccgcggctttcggccgagttggcggcctgcacgtcatcaagcagatgcgccatcttctccaggctacgggcgaacatgatttgcccgacggtcaatggccgagggacgcgccgccgcaattccgccgccaaacgcatcgccagcagcgagtggccgcccagtgcgaagaagtcgtcgtcggcgtacacgttttcacggcccagcagttccccgaacagcgccgccagtaggcgctcgctgtcgctgtgcggcgcgcggccgctctgcgggttcagctgcggccgtggcaacgccttgcgatccagcttgccgctggcgctgagcgggaagctgtcggtcatgacatagctgaccggcatcatatgcgccggcaaacgcgcctccagcgcctgatgcagtacggcggtatccagcgtcacccccggttgggcgatcagccaggcgaccaactgccgcatatcggcgccgcccagtcccgtcgcgccctcgcccagttcgatggcgtgcaccgccgcttgcgctacccccggctgcgccagcagcgcctgctcgatttcacccagctcgatgcgctggccgcggatcttcagctgatcgtcgctgcggcccaaatactcgacgctgccgtcctccagccagcgggcgatatcgccggtgcgatacatgcgagcgccgttgccggcgggatcggcgacaaaccgctgcgccgtcaatcccggccgatgcagatagccgtcggccagttgaatgccgcgcaggtagagatcgccggcgcagccgacgggcaccggccgcagcatggcgtcgagaatgctcagttgggtgttccagaccggtttgccgatcggcacgccggcgccgctcaccgccgccaatgcctcgccggacgccggttgataggtaacatcgaccgccgcctccgtcgggccatacaggttatgcagcggcgcggcaaccaatgcctgatagcgggatgccagttcacacgacagcgcctcgccgctgcagaacacgcgtttcaggctggcggcggcgcgctgcggcgcccgttcgttcagcgcctcaacccagatagccaacatcgacggaacgaaatgcagcgtggtcacgccatagtcgtcgatcaaggtcgtcagcgcctgcggatcgcggtgcgcctccggcggcgccatcaccaggcgcgcgccgaccatcagcggccagaagaactcccaaacggaaacgtcgaagctgcacggcgttttctgcaggaccacgtcctgcgcatcaagcgcatactcatgctgcatccagaacagacggttgacgatcgcccggtgattcaccaccacccctttcggccgcccggtcgaaccggaggtatacagcacgtaggcgggataatcgccgttccccgccggtgggcgcggcgcaagcacacgcccgctgtcatccagtgcatcgaaccgcagcgtcggcgccagcgcggcgaagcgggcatccaaggtgctctcggtgataatcagccgtggtttggcgtcctccaccatgtaggccagccgctcgtccggatagccggtatccagcggtagccaggcggcgccggtctgcacaatcgccgtcagcgccaggctgaggcgcacggatcgcggcaacgccaccgcgacgatatcccccggctgaatgccagccgccgtcagccgttcggccaacagcgcggcctggcgctgcatgtcacggtagctgaggctgtgcccggcgtcctgcagcgcgatgcgttccggcgtgcgccgcgcttgctcggcgatcgcctgatgcaaggtggtgtccgccaccgcctgcccggtgcggttgactgccgcgaccagcgcctgctcctgcggcgtttgcaattgccagcgcggcagcggcagatccggctgcgctatccactgttgcagcagcgccatcagccgtgcggcgaagcgttcaggctgcggcaccgaatcgcggtactccatcagcagacgcaggcgctcgcccggcagcaccagcagcgtcagcggatagtgggtatagcctttgttacggatggcatcgcagcgcaaggaacctgcgccgccaagcaaggcgtcgttgtccgggtagttttccaccaccaacagcgtatcgaacagcgtgcccgccccggccagatgctggatctcccccaagcccaaatcgtcgtgctccagcagttcaatctgccgatgctgcagttcggtcagttgatccgtcaacgaacggtcatgctgcagacgaacccgcaccggcagcgtgttgctgaacaggccaacgtgttcctcaatcccttctatctggccaaagcggccggaaaccggcgagccgaacaccacgtcctgatggccgcaacagctggccagctgcagcgcccagatgccctgcatcagggtattgagcgtcaacccgcgttcgcggcacagggtcagcaagcgcctttcctcggccggcggcagcgtcatttccaactcatgcacgcgatcgttatgcgattcaccgaacaacaacgtcgggcgcacatcctgcagcgtctcacgccagaggcggcgcgaggcgtcggcatcccgcgcggtcaggcggcgcacgatatcggcgtagttcgagcgcagcggcggcaacgcctgctcgccttcacgcagggccagcatcagatcgttgagcaccaccggcgtcgaccagccgtcgacaatcagatggtgtgcgttaaggaacagcgtgtagcgttcgctatcgccgtgtttgatccgcagcgcatgcaacatcgcgcccggctggttaaacagatcgcgctgcagctcttcctgttccagttcatgcagcgtctgcgcttcttgctcttcggacagcggcggcagcttacggctgtccagcggccaatggctttcctgcggtatcagctgcagcggttcgccctcgcggttgaaccgggcggccagctgcggatggcggcggatcaccgcattcagcgcttgctggagttgatgttcgtccagctcgccgcagaggctcaggcgcgtcagcgagttatagctgccgccctgctgcgccgtctgcgcatggaacagcaggccatgttgcaacggcaacagcggcagcgccgccgccaacggcccgcactcttgctcccaggcgcgcaccgtctcatcggcaacgttcggctgggcgatctcggccgccaccaacgttgccgccgcgcgttcgggatgacgctcggcaaactcgcacagtgaacgcaccgcttgctcgatgccgctgtgcagctgcgcaatgtcgctctcgctgaaaatcgcctccagccagctccagttgatcgccaggcaggcgccgtcgcgccgctcttcgacaaagatattcacctccaggccatacgacagcgcctgttgcgcatcctgcgccacggcgaaggcgtcgcggaagcgggtttggctgcgttgcggcgtccagtgcccctcatcctggctgaaacgcccgaggtagttgaacaagatctccggcgcattgcgctgcgccagcgccgccagttcgtcacgctgcggatgcagataacgcagctggccataaccgacgccgcgatcggccaccgctcgcgtcgcccgtttcaccgcacgcacggcctcattgtgctcagcgtcatgcagttcaatgtgcagcggatactccgccgtcagccagccgacggtgcgggccagatcgagtccgtcgtccagttctgcgcggccgtgcgactccagagagaaacgcagcgaagcggcctggaaacggcggcggcaggcctgagccagcgcgcacagcatgatctcttcaacctgcgcgcggtatccctgcggcaatgtgccgagcagcgcggcggtcagccggctgtcgagcaacgtgcgtttttccgatacgtcgccagtgcgatcgctaagcggatccagcgcgcgtcgccccaaacgcggtgcgccgtccgccagcatccgccgccagaacggcagctcggtttcccggcgttcagcgtcggctcgtagacgtgcagaccactcatagagcgaggtttcttccggcggcaaggtgatccgctgcccctgcatggcgctgttggccacctgccgcagctcgtcgagcaggatgcgccaggaaacgccgtcgactaccaggtgatggatcgccagcaccagccccaggctctgcccgtcgcgctgcaacaggatgccttgcatcatggtgccggcagccggttcgagatggtcaagtgcggcatcaaacgcctgttccgccgctaactccagctcaccggacacgctatcaacctgcatcagttcaccgccggcggcggtttcaaccaccaactgcccctcgcggatccgcgcgcccagcgccgggtgcgccgcacgcaactgctccagggcataacgcagctgttccggttgcagctcggcaggcacgcgcagaaaaacgccgtgcgcgaagcgacgatgcatatcgcccgtctcggcaaaccaatgcaggatcggcagcccgtcgatcgggccttgttgcacgctgcgcgcagcctgagagtctacggccagcggctgcatcgcctgcgccatgcgcgcgggggtgtgcagcgcgaagatctcgcgcggccgcagcagataccctttgcgccgcagggcggtgcccagccccatcgccgagatgctgtcgccgccgagcgcgaagaaatcgtcgtcggcgccgatgcgatccatccccagcagctgcgccatggcgccgcaaatcagcctttcctgctcggtggccggctcgcgaatgctttgcgccagcgtctcctgcggtttgggcagcgcctggcggtcaatcttgccattcacgttaagcggcagctccggcatcaccaccaggatcgccggcaccatataatccggcagacgttgcgccaactgccccagcagctcgctttgcagcgagggtgaggcacggcgcgcgtcatcctgcaccgagcaatagccgatcaggcgataggtggcgccgatcggctcggcgatcgctaccgcccgccccacgtccggcaaggcggccaaggcgctttccacctcacccagctcgacgcggaagccgcgcaccttgatttggtgatcggtccggccaatgaacaccagatggccctccgcgctccagcgcatcagatcgccgctgcggtacatcacttcgccttcggcgaacggattggcgacaaagcgcgccgccgtcagatccgggcgccgcaggtacccgcgcgcgatgcctttgccggaaatgtacagctctcccgccgcgccgatcggcaccggctgcaggcggccgtcgagcagccagacttcggtattggcgaggggccggccaatcaccggctgttcggcggccgtgaccggcgcgccgagggtatcgacggtgtattcggacgggccgtaatagttgtggatctccacctccggatgctgctgcatcaggttccacagcgtcggcgttgccgcctcgccgccgatcatcacgaacgccggcagcgggaactgccccttcagcaggccgcagtccaccagttgcgagaagaatgacggcgtgatgtccagcagatcgatcggcgtcttttgggtttgttcgagcagcgcccagggatcgcggcgcagctcctcatcgaagatgaccagttcgctgcccatcatcatgcagaacagcggttcccaggaggagtcgaaagagaacgaagcggtatggccggcgcgcaggcggcgcccatggcgagcctggaatttttcgatcgccgggccaaacagcgaggcctgatgcgacaggaacaggttcagcagcccgcggtgcgtggacatcacgcctttgggtttgccggtcgaaccggaggtgtaaatcatataggccagatgcgcctcgttcagcggcgcacgccgttcggcatccgttatcggcgcagcttcggcggccgcgcagcgcgccaggcacgctgcgtcgtccaggcacaatacctgtggcagatccggcatattggcctgcgtcgcgcggtgggtcagcaacatcgccggccgcgcgtcgtcgcacatcagcgccaggcgttcacgcgggtaatccagatcgagcggcatataggccgcgccgctggccaacacgccgaacagcgcgaccagcgtgtccaccgagcgcggaatgccgatggcgaccacgtcttccgcgccgatgccgctttcgatcagcactcgccccagctgcatcacccgttcggagagctgacggtagctgaggcgcacatcgccgcaggccaccgccagcgcctcgggctgccgctcaacctggcgctggaaagcgtccatgatcgacaccatgcccgccggcggcgtcagatgcgcgccgcgcccccaggccgcgagctgttttaactccccttcgccgatcaacgccagttgaccgttcggctggtgcggctgtcgcgccagttgctgcagccaatggccgatgcgctccgcgtggtgatgcaaggtgcgcggcgagtatttggccgggttggccaccaacgacagcgtcagcacgccgttgcgaaagccgatctcaaactcgagatcgtcgaccggccccatcgccagcgtatgggtaacggccgcctggccgtcgaaggacaaggcgctgtggtagaccttgacgttgatcaccgggccgtacagttcctgatggccgccgaccaggccgagatcgcgtttgatctgctccgcttcatagcgttgatggcggcgcgcctgtttgatttgcgccacggtcgcctggcagacgtccgccagcgacatctccggcgtcacattcagcagcagcggcagcacgttaaccaccgggccgaccgccgccagcgcctgggagcccatacggcgcatgaaaggaaaaccgagtgaaaaacgggtttcgccgctcatgcgcgccagatacatcgccagcgccgctgtgacgatatcggccggttgcagcgactgcagcgcgccatcgcgcagcgcttcgtcaaacagcgattccggcagcaccagcgcctgtttgagcggccgggcgcccggttcaacctcccgactctccgtcgataacgacagcggcgacggcaaatcgcgcagatgctgttgccagaattcgcccgcccgccggcgcgccggcgacgtttgccattgctgatactctgccaccaccttgccgaacggggtaaacggcgatgccgccggcgacagcccgtgtcgcagcgcgcgatagatatcggcgatccgacgggtgatggcctcgaagctgaagccgtccagggtcagatgatgaaagcgctggtaccagaaccagcgatcggcgctgacgcggatcaccgcatggcgatagagcggccgttcgccgtccgccggcagatcctgcgccagatcgtcgttcatcagcgccagcgccgcctgctcggcgtccggccgcgcgctgaaatcgaaccactccggcgcctgcacgcgtgcgggatcggctatcagcggtaaacgctgcaccggctggccgtcctgcgcctcaaagaatcgcgcctgaaccgtatccgcttcggccagcccctgacggatcgcgcgctccagcgccgaacgatcgatagcgccgtgcagttcggtgtagtgcgccacggcgaagctgttgcggcgcagcgcgatttggtcggcgatccagatccccggttgcgcagcaaccagcggataatcccgatactcgacctgagtatccggtaaagaaagcgtttctgacatggtgtctgtcctttccctcaaacggaatatatcgattgactgccaggcgcttaacgcgccgcatccgccgctttcagcgccgccggccgcatgtcctgccagtgcgtttcgatgtagtcgatgcactcgccgcgcgacgccggccccatcagcacgcgccacccctgcggcgtatcggcaaactgcggccacagcgaatactgctgctgcgcgttgaccagcacggagaaacggaggctttcgtcatcgaacgggttttgttgttcctgagtcattttcattacctgtctgtcaaaatgtgggattacttcattgcggaaagcagccggcgcacgccgtccaccaggccgccgcgccagcagagcgcgtcatgtccgccggaatacacgcggtagtcggcgcggtgcccggccgccgtcagcgcctggtgcatctggcgattgacgaattcgatgtccgcctcccgatcgccggcctgttggatcacggtgagcttgggtgccgccgcgttgcgctgccgaacctggcgtatcagccagccttcctccagttcgtggcgtttttcgaactgggtcacaaattgcaccgtaggccaccagaaagagccggactggctcagcacgtggccgaagcgctcgggccagtgcaaaccggcgtataacgccgccagcccgccgtagctctggccggcgaccacggtgcgcgccccagtctcgctgaacgcttcgcggcgctgcgcctgcggcagcagttcgtcgatcaccgcctgccagaagacggcgttgcagggcagctcgttttcccggtattcaccatcgatcgcatcgatcagcaaccagcacgcgggaggcaactgcccttttgcggtttcgttctcgatcaccggcagcagcgcatgcctttcgatccagttttggccgtcgagcagcagcaccagcgggcggttcgctttcaccgccgcgtcgccgctggcatacagccaaacgcgccgctggttacccagccgttcgctgtgccactgaaatcgctgtagccgcgcctcatccagcggccgatcggcagcctgccaggcgctttgatcgtcggcatccggtccttgcgccagggatacgggccgcgggcgatgagacggccccagcgagaggcgattcagcggatcggcgatcgccaacgggaacagcgatacccaccaggcacgctgctggcggtcgcgtaacgtttcgtcatcgctgaagacgggggggagatctcgctcggtaatggggatcaggctgtagctgccgcgccagcggcgatcgataacggccgagccgtaccaaacgtcggtgccggggagcctggtcaggctgctgggggacgtgctgtggtgatcggtaatgccgttgatatcggcgtaaacgcggcatatcggcgagtgccgttcatcgccggcggggtcgcgccatagccaggtcattttgacgtggcgttcgtcgagcgcgtcgacgatgggcgtgccctgcgcggcaaccttttgccaccacgcggattgccctgccgcctcttcacgcagccattgcgccgccaatccctcaaggtcgtttcctggcctcttttccggcaaaaactccatagcgcctcttacataacatgagtgatttttacaaaacctgacaatcgtattgatactcattatcattttcaatactatttgtcggatttttaccgtcgtgcacatacggcgtctccgcgtcgacgggtgaataccgctcgtcgatatttcggggtttatcagggtggcataacacacaacgcaggtatgcaggagagataatgaagattaaaaacaaagggatagctaacgggaatgcggaggcgatgtccgccaggcgtctgttgctgggatcggcgctggcgttattgcccttggcgcaacacgcgtctgcggcagcggacgaaacgattttggtgaccgccgacgcgcaaaacagcgtgaccgcgccggtcaaagggatcgtcgccaaagagagcgccgccggcaccaagaccgccgcctctctgcgcaagacgccgcagtccatctcggtggtcacgcgcgagcaaatgaacgaccaggagccggcgtcggtcgccgacgcgctgaactacaccagcggggtgatcaccacctaccgcggcaactccaaccgcaatgacgaagtgatcagccgcggcttccgctatgcgcccaaactgctcgacggcctgcactttggcctctcgagccaaaatggcggcgccgggcagatcgacccctggctgctggagcgcgtggagatggtgcacggcccggccggcgtgctgtacggccaggtcagccccggcggcgtggtggtgatgaccagtaaacgccctaccgcccagagcattcacgaagtcaaattcagcaccggcaaccgccatctggcggaaacggcgttcgatttcggcggcaaactcaacgacgacaacaccctgttctatcgcctgaacggtatcgccagaaccgaacatgagttcgtcaaagacagcaagcagcaacgggtggccattgcgccggccttcacctggctgccgaacgaagacaccagctttacgctgctgaccagctaccagaacgatccgaaagccgggtcgcgcaacttcctgccgcgcgccggcacgctgttcccgaccagcgcgggctacgtgccctatgacttcaacgtcagcgagcccagcttcaacaaatcgcggcgcgagcaggcgtcgatcggttacagcctcgagcacaacttcagcgatgcgctgtcgtttacccagaacctgcgcttcactcaccgcgatgaagactataaatatctggtctataacgtaaattctgacgttaacgaccacaccgtgacgcgcagggcgcagcatgaaacgcagatgaccaacgagtttggcgtggataaccagctgaagggcctgttcgataccggcgaggtgaagcacaccgtgctgggcgggctggattaccgctacagccatagcgattcgaagatgtatcgcgatcgcggcaacgattacccgatcgactgggccaatccggttcgccccagcattgatggcagcgcgctgacgctggtttccagcgaattgaagacgctgaatcaggtcggggtgtatctgcaggatcaactggagtggaataactggaacctgctgctgtccggccgccaggactggtcgcaggtcaacacccgcgatcgcaccgccggcggcaaagagcagacctacaacgatgcccagttcaccggccgcgcgggcctgctctacgccttcgagaacggcatttcgccgtatgtcagctacagcacctcgttcgatcctaacctgtatccgagcgcgccgggcgccgatccgctcaagccgaccaccggcaaacagaccgaggtgggcgtgaagtaccagatcccgggcggcaataccctgctgaccctctcctggttcgacattacccagcgcaacgtggcgtcctataaccgtctcacctccgcctatgagcagattggcgaggtgaaatccaaggggattgaggcggaagtgcacgctcagccgacgccggagatcaagctgaccgcagcctatacctacaccgacgtagtgaccaaagactccaactcggcggacgaaatcggccacagcccggcgggcatcccgcgccacgcggcgtccgcctggggcagctacagcttcctgagtggcgcgctcaacggcctgaccgtcggcagcggcgtgcgttacattggcgatgcgccggccgacgccaccggccagtacgacgtgccgcactacacgctgtacgacgccatggtgaagtatgacctcggtcaggcttcgtcggcgctgcgcggcgcggcgctgcagctcaacgtgcagaacctgacggacaagaaatacgtttcgtcgtgcagcggtgagtacgcctgcttctacggcagcggccgcagcattatcgcttcggtcaactaccgctggtaacgaaaatgggcggccagcgccgtaatgcgtgtcagttagcgtttttctgaaggtattggtgacgtatttcggtcgataaatgtgagatgcaccatgaaactcatgcgcctcgaccgagcaagggaccgtaggcgcggtcccttgcaacccgcgcctttgccctatcagacggttggctttgccaactgccctccctccgccatagcgcattgaggccggttgcgacaggcgtccctgcctgtctcacctgaaaccgccgtccatggcggtttcgcctaatgcgctatgcctgcgttcggcgtcttcaagggcgcccaacaccgcgctcatctccaacgtctctaccacaacctcataagcgacagatttcccggtagccgccagctcaggtgttgaccttgggcgcgcatcaccggctgccgagcaagacggcgttgtcaggggcaaccggccagggaaggccggttgaggcgagactaacagcgacgtttgtcgcagccgacccgcccgacaatgcagacgcggcgagggtatccgcatagcggacagacggtgttaagcgaaggcgcgggtgtaggggccgcgccttcggcccctacaattgccgttcattgtggtaacagagaaattcggggtatttacggcaatttttcctgcacggcgctgacagataccggataaaaaatgccagtcaggtttacggccagcgccgcccctttcttccgcctttctcgccgcctttactcctgcttcaattcccgcaagtgtttgtacaccgtggcgcgccccatcgacagcacgttggcgatgtaatccgccgcgcttttggccttgaacgccccctgatgatagagatcgctgaccagccgccgtttctgctcgcggctcagcgcgccgagcgcagcgttctcgcgccgcagccagtcatgcaggaaggtgttgatcttctcctgccagtcgtctttgaacagctgttgcggctgcggctgcaatcgcgtgaccgataaaaacatgtccagcgcattgcgggcgtcctcgaacatcgcggtgctcaggttgatgcacagcagatagctgggcttgccctgctcgtcgcgcgcggcgatgctcaccgaacgcatctttttgccgtcccagttcagcttttcataggggccggtcacgccggcgccgccatcgagctcgaagtcttccaggccggcgtcatcgcccggtttgcgcttcgacaggttgttcgccagataggcaatcttgttggtggccagatcgtggatcaccacttccgcattcgggaaaaacagcgcggcgatgccgtcggcgaccgatcgcaaaaggtcgagttgagaagaagagttcggcacgctgggggtctccgtatagcccggtttggtttgcggttcagccgcttagcataccgcagttgccgccgcttgccgagcggagcggcggcaagcggcgtatccttcaccggttattccgcctcggcgccgcgccgataaaacacgtagctctcgcgcgccacgctgtcgcggacccgatagcgccagatcaggccgagcgtggtaaaccacagcggcatgctgcacaacgcgatcagcgtatcgctatcgaacaccatcagcaccagcgtaaaggcgaaaaatgccagcgtcagccaggccatcgctaccccgcccggcattttgaagtgggaagcggcgttcagatccggccgcttctggcgatacaccaggtaggcgaccaaaatcatgccccagctgtaaaccaccaggatcgccgccacggtagagacaatggtgaacagcgtcatgacgttcggcaccagtaccagcagcaaggtgccggccaccatgcagaagcaggaaaacagcaggctgcggatcggaatggccgtggtgcgcgacagaatgcggaactgaccgtgggcgtgcttttccatcgacaggctgtacagcatgcgggtgctggaatacaccccgctgttggccgaggacatcgccgaagtcagcaccacgaagttgatcaccgcggcggcggccggcagccccgcccgatcgaacagcatcacgaacgggctgctgtccggcgagatgtggctccatgaggtgacggcgataatggtcagcatcgagcacacgtagaagacgatgatgcgggccgggatcgcgttgatcgccttcggcagcaccttctcggggtttttggtctccgccgacatcgtgcccagcagctcgatgccggtacaggagaaaatggcgatctggaagccggcgaaaaagccgaagatgccgtgcggcatgaaaatggcgggatcggtgacgttatgcagcgaagcggtcacgccgtccggcgaagtccagccgctgaacaccatccaggcgccggtagcgatcaacgcgacgatcgccaccaccttgatcatcgcgaaccagaattcggcttcgccgaacatcttgaccgacagcatgttgaacagacacagaaaccccagcgtcagcagcgccggcaaccagggcgagacgtctggcagccaatattgcacgtagccgccgcacaccaccacgtcggcaatgcaggttacgacccagctcagccagtaggaccagccgagaaaaaagctggcgcgcggccccaggtattcggagacaaaatcggcgaacgagcggtaatcgagccgcgtgagcagcagctcccccatcgctctcatcaccatgaacatgaaaaaaccgacgatggcgtaagtcagcacgatggaggtgcccgacagcgcgagggttttcccggcgcccataaacagcccggtgccgatggcgccgccgatcgaaatcagttgaatgtggcgcgcactcagcccgcgctgcaaggtttgggcacagtgaggcccctcggctgaacctgggttcagccgatcgcagtggttttttgtcatggtgttacctgtccgtcgttaaggcgattaagcaaccgatgcgcggttgcagcaggaatgaaacgcccgcgggcgctctaaccggcaaaaaaattgagaccaaacgctgcccgccccgttgtgacagggaggtaataataatgggtaccaagaaaatgctctcgtgagccgtcgtatcgcccacgtttggcgtacaaagcctgagcgtggtgggtaaacactacaatatcaaatggttatactttcccttgtgcaacaaaaaaacgacgccggagccgttttaacattaatttaactctggcgaggggaaatgccattgtcaacatggcagttaaataaaatgaaactttttgatcacattcaagcttctgaaaaatagataaaaagggtttttatgcgctttatatgcataaattatgcatgtgatcgctcaccgctgacaaaaagtaattaactattcatttaccgctctgcaggcggcgaaaaaccgtccgctggcccgatgagaggggggctaacaaccggcataattagtggtaaatttagcgtcgcaaagtgttatgcgcttgctaatccacggttaaacgaaataaatacctctaatatataaaggttggttatggaaaagctatcctacgcttcagacagcagcaccaccgcttgggctacatatctgcaacaaatcgatcgcgtcgccccttacctcggtgacctgtcacgctgggttgatacgctgcgtcaccctaagcgcgctttgattgtcgatatcccgctgcagatggacgatggcaccatccgtcacttcgaaggtttccgcgtacagcacaacctgtcgcgcgggccgggcaaaggcggcatccgcttccaccctgacgtcgatctgaacgaagtgatggccctgtccgcctggatgaccatcaagtgtgccgcggtcaacctgccgtacggcggcgccaagggcggcatccgcgtcgacccgttcaaactgtctgaaggtgaactggagcgactgacccgccgctacaccagtgaaatcggcttcatcatcgggccacagaaagacattcctgcgccggacgtcggcaccaacgccaaagtgatggcctggatgatggacacctactccatgaaccacggcaccaccatcaccggcgtggtcaccggcaaacccatccacctcggcggctccctgggccgtgagaaagcgaccggccgcggcgtgttcgtcaccggcagcgaagtggctaagcgtctgggcgtgcagatcgaaggcgccaaagtggcggtacaaggcttcggtaacgtgggcagcgaagcggcccgtctgttcgtcggcgtcggcgcgcgcgtcgtcaccatccaggaccactccgctaccctgttcaacgccgacggcatcgacctggtcgcgctgaccgaataccaggccaagcacaagcagatcgccggcttccctggcgccagcgagatcgcgagcgaagcgttctggtcggttgacatggacatcctgatccctgcggcgctggaaggccagattacccgccagcgcgccgaaatcctcagcgccaaactggtgctggaaggggctaacggcccaaccttcccagaagcggacgacattctgcgttcccgcaacatcaccgtggttccggacgttatctgtaacgccggcggcgtaacggtcagttacttcgagtgggtgcaggacatggcgagctacttctggagcgagtccgagatcaacgagcgtatggacaagatcatgaccgacgcgatggtccacgtctggaacaaggccgccgagaaagagtgcagcctgcgcaccgccgcttacatcgtggcctgtgagcgcatcctgaccgcacgtaaagagcgcggcatctacccaggttgatacccgtattccggcctgccccggcaggccggattttcctcagcgcaaacagcgtttcaacaccttaccggtactggtcatcggcaagcgttcgacaaactcgacgatacgcggatacttgaacgccgccagccgctcccggctccaggcgatcagcgcttcttcctcgatcggttcttccgtttccttcaataccaccaccgctttgatctcttcgcccagcgaaggatgctcgacaccgatcaccgccaccaacgacaccgccggatggcgaatcagcgcctcttcaatctcgcgcggatagacgttgaacccgccgcgaatgatcatgtccttggctcgatcgacgataaaatagaagccgtcggcgtcgcggcgcgccagatcgccggtgcgaaaccagccgttttccagcacctccgccgtcgcttcggggcgattcagatagcctttcatgatgttgtaaccgcgcaccgcgatctcccccacctgatcgacaccgtcgatcggctgcccggtgacgtcgagcaagcgaacctccacgccccagatcggttggccgatggagccgggtttggtcacgcggtgcggatggttaaaggtggcgaccggactggtttccgacagcccatacccttcgagaatgttgacgccgaagcggcgcgagaaatcctccaggatctgcaccggcaggctggcgccgccggacaccgccatacgcagcgtgctgcgcaagcgttcgatatccgtgtgctcatccagcgcattcaacagcgcccaatacatggtcggcaccccggcgaaaaaggtgatgccgtgccgttgcatcagcgcgatggcctgtgcggcgtcgaagcgctcgaccagcaccagggtggcggcggcggcaaatccggcgttcatctgcaccgtcgaaccaaacgtgtggaacagcggcaaggttaccaggtgacgatcgggattcgcctctgagccgtcgaacagccgcaccgatcccaatgcgttgagcaccagattggcgtgggtcaactccgcacccttggcccggccggtggtgccgctggtatagagcaccaccgccgtgtcgctttcgagcgtcgcggcagacgcgaactcagtggactgtgcggctatcgcctggctgaaacgctccccctcgagcggcagccgatcgccgataataaacacctcgcggcattgttccgccttcgccgccgcccgcagtgcctcttcccccaacggcagagtgctgctgccttcgaaacagaacagcgccaccgccgccgaatccgccaggtaatagtcgaattcggcgcttttaagcaaaatattcagcggcaccaccacggcgccgcttttgaggatgccgtagtagatagccggaaactccggccggtttgtgcaggccagcgccacccgttcaccgggctgcacgccgcgcgcgaccagcaaattcgccacccggttggccatttcattcagcgcccgatagctgagcgggatatcgtcctgtatcaccgccggccgctccggccaggtacgcgcactctcttcaagcaaggttgccagattcagcatcggggattctccctggggttgagcgacgagaaaagcgccgcagtatcacgagtatagataggcactttgcggttcgcattccaaggggggctgggctataccttaggcattccccctcctgcaggagttgtgatcatgagcaagaaaaagatcctgatgctggtcggcgactacgccgaagattacgaaaccatggtgccgttccaggcattgcagatgatcggccattgggtggacgccgtgtgccccggcaaagccgtcggcgactatatccagaccgcgatccacgattttgacggcgcgcagacctacagcgagaaacccggccaccgtttcaccctgaacgccgacttcgccgccgccaaagaagagcactacgatgcgctcttgatccccggcggtcgggcgccggaatacctgcgtctgaaccccgacgtgatcgcgctggtacaggcgtttgacgccgcgaaaaaaccgatcgccgccgtttgccacggtccgcagctgctggcggcggccggagtgttgaaaggccgcacctgcagcgcctacccggcctgcgcaccggaggtgcggctcggcggcggtcattatgcggagatcggcatcgatcaggcgcacgtcgacggcaatctggtcaccgccccggcctggccggcgcatccgcagtggctggcgaagttcgctgaggtattggagcagtaatgcggcgctaacggagctgctcgatcagaaaatggatgtcgtacagccagcgtttggcgcgcgcggagcgcaccagcatagacacgcacagcggccgggtgtgttctttacaggcggagggagaaaaccagcgcccggtattgctcggcggctggaaatacagctcgtggttatagttgccgctgtcgacgccgaaggtgtcgaagtagcggcgcatcagcgtgttggagtcgctgaacgacagattgagcacggtgttaatctcggtttccggggtgatggccacgcccttctgcagccgccctgatgcgttgaaggcggcgataagcgcgatgacctgttgctgaatgtcttctgccatgacgacctcgagccgatatgaagaaaatgtgaatacaattgtctgactctgcccgccgcggcgagttcgggccgccgcgcgggttttccgtttctttacactttccataaaaaacgcgcgcagccaaacgcccggcgcgcgcggtcgaaggttagcggctgagcgtcgtcttgtcggcgatgacgccatccccctgccgctcggcggcaaccccgccgcccaacactttatacagggtcgcctgattatcgtacgccgtctgctgtgcggcgatcagcgactgctgcgccgtatacagcgtgcgctgcgcgtccagcacggtcagatagctgtcaacgccctggcggtagcgcagttcggccagacgataatattgctgcgccgccgccacatagccggtttgcgccgccagctgctcccgcagcgtggctttgcgcgccagcgcgtcggcggtttcctgaaatgccgtctgcaccgctttctcataggtggcgacatacagatctctctgcgctttgctgtagttcagttgcgacgtgttatagccgccgctgaaaatcggcaggctgatgctcggggcgaatgaccaaacgcccgcgccgtggctgaacagcgacgagagttcaccgctgcccaccccgccgctggcggtcaggctgatcgacgggaagaacgccgcccgcgccgagccgatattggcgttggcggatttcaggttatgctccgcctgcagcacgtccggccgcgtcagcagcacctgcgaagaaaccccggccggcaggtcgcgcatgatcccgcccagcgcgtcgatgccgccgggcagcaggttttccggcacgctttgtcccaccgctaaatccagcgcgtttttcgcctgcgcggcgctggtcgcatagctggcggcgtccgatcgcgcctgttgataaacggtctccgccgacgccacgtcgaccagcgacgagatgccgtgctgctggtttttgcgcgtcacctccagcgaccgtttggcgctttccatcgtctgctgcgccaccgccagattgctgcgctcggccgccaccgccacccagtcggtgacgatgtcggcgatcaacgtcaggcgggtgcttttcgccgcctccgagttcgccagataggtttcgaacgccgcccgcgacaggctggcgtttttgccgaacagatccagctcaaaggcgctgacgccggcctgcgcttcgtaactctggctgatggcggtggcattgccgttgccggtcagcgaacgcccgcgactgccgtcggcggtggcgttgatcgtcggcaacagcgctgcccgctgctcaccgtacagcgcgcgcgccgaggcgatattggcgatcgcctcgcgcagatcgcggctgctgctcagccccatcgccaccacctggcgcagcctggcgtcctgcacatagtcgcgccaggcgacgtccgggtagctcaacgcctgcttgccggcggcctcgccctgcggcaggttggcgggcacctgcgccgccgggcgctggtagtgcggatccagcgacagacacccgctcagcagcagcggtaaagttaacatcatgactcgttgcaacacgttattctcctgcctgcgacggcgagttggcgggccgacgggtaaacatgcggcgcaccagcacataaaacagcggtacgaagaagatcgccaaggcggtggcggtgatcgtgccgccgataatgccggtgccgatggcgattcggctgttggcgccggcgccgctggataccgccagcggcagcaccccggcggtgaacgccagcgaggtcatcaggatcggtcgcaggcgcatgcgcgccgcgtggaccgccgcgccaatcagcgtttccccccgctggtgcatctcctcggcgaactcgacgatcagaatggcgttttttgccgacaaaccgacgatggtcagcagcgccacctggaagtagatgtcgttttccagcccgcgcagcgtgatcgcaagcagcgaacccacgatgcccatcggcaccaccaacatcaccgcaaacggaatcgaccagctctcatacagcgccgccaggcacaggaacaccacaatgagcgaaatggcgtacagcgacgatgcctgaccgctggtcagccgctcctggtaggagagcccgctccaggaatagctgctgccggcggagaacttcaccgccagtttctccatctcgctcatcgccgtgccggaactgacgccggcggcgccctgcccggtgatctcgaacgacgacagcccgttatagcgcgacaggttttccgggccgtagatccagtgtgaggacgcaaaagcggagaacggcgtcatgctgctgtcgcccgccgcgttggtgccgcgcacaaaccatttgtcgagatcttccggcttggcgcgatacgctacgtcgccctgcatatagacttttttcacccggttgcgatcgataaagtcgttgacgtaggtgctgccgaacgcgctgctgagcgtgctgttgacgtcgccggcgctcaggccgagcgcctgcagtttgccgctgtcgatctccacctgcagctgcggcgtgtccggcaaggtgttggcgcgcaccgccagcagcgacggattgccggcggcggcggcgacgatctgatcgcgcatcgtctgcagctcggcgcgggtggtcgcccctttggcctgcagctcgaaggtgaagccgtcggactggccgaagccgtcgatcgccggtgggctcatggagaacacctgggcgtcgcgcagcgaggcgaaatgcgccatggcgcgcttggcgatggcgtcggcggtgttttcactgccgccgcgttggctccagtctttgaggctgacgaacgccatgccggcgttttgcccgctgccgctgaagccgaaaccgttgatggtgaaaatggtgctgacgttggccttttcctggttgaggaaataggctgtcaccgcttcgctcaccgccgaggtgcgcgcattggtggcgccggccggcaaggtgtactgcaccatcaccgaaccctgatcctcattgggcaggaaaccggtcggcaaacgcagatacatcacggcggtggcgatcagcagcaggccgtacagcagcagatagcgcgtcggccggtggatcaccccgccgaccttgtcggcgtacttctcctgcagccggttataaccgcggttgaatttacccagcagccctttgtcggtctgttcttcatgcgacgctttcagcagcgtggcgcacagcgccggcgccagcgtcaacgccagcaccaccgacagcaccatcgaggagacgacggtgatcgagaactggcggtagatcaccccggtggaaccaccgaagaacgccatcggcagaaacaccgccgacagcaccagcgcgatgccgaccagtgcgccggtgatctcgcgcatcgatttctccgtcgcctcgcgcggcggcagcttatcttcacgcatcacgcgttcgacgttttccaccaccacgatggcgtcgtccaccaacagcccgatcgccaataccatgccgaacagcgtcagggtattgatcgagtagccgaacgccgccagcacgccgaaggtgcccagcaacaccaccggcacggtgatggtcgggatcagcgtggtgcgcaggttttgcaggaacacgaacatcaccaccactaccaggaccaccgcttcgaacagcgttttcaccacctcctcgatcgagatgttgatgaagtcggtgctgtctttcgggtaggccaccttataaccctgcggcatcgcgctttggtattccgccactttggccttcaccagtttggcggtattgagcgcgttggcgcccgccgccagcttgaccgcgatccccgccgccgggtggccgttgaggtgcgcgctggcggaatagtcttcgttgccgagctcaacccgcgccacgtcgcccaagtgcaccagcgcgccgctgctgtcgcttttcaggatgatattgcggaactgttccggcgtttgcaaccgcgactgcgccttcaccgtggcggtcagctgctgatcggcggcggccggcagatcgccgattttaccggcggatacctgggtgttttgcgcctcgatcgccgtctgcacgtcggaaggcatcagcgcatagctcgccagcctggtcggatccagccagatgcgcatcgcgtattccgagccgaacacctgcacgtccccgacgccctcgatgcgcgacagcggatcctgcaggttgctgaccagatagtcggaaatgtcggccatcgtcgccttgtcggtctcgtcatacaacccgacgatcagcagaaagctgctctgggatttcttgaccgtcacgccttgggcggtgacggcgctcggcaagcggctttccgcctgctgaactttgttttgtacctgcacctgcgcgatatccggatcggtgccctgatcaaaggtgacgtcgatgctgaccgagccgctggagctgctggttgaagagaaatacagcaggccatccagcccggtgagctgctgctctatcacctgggtgacgctgttttccagcgtttccgcgtccgcgcccgggtaggtggcggagatggaaatctgcggcggtgacacgtccgggtactgcgagatgggcaacgaattgatcgacatcaggccgcacagcatgatgatgatggcgatcacccaggcgaacaccggccgccggataaagaactgcgccatatcactgctccccgcgttggtttttgtcgaccgagacttcaaccggcttcaccgcggcgccgatcgtcaccttgctggtgccttcgacgatcaggcgatcgccttcgttcagcccgctgccgatcagccagttgctgcccaccacccgttcggcgctgacggtgcgctgcgccactttgttttgctcgtcgaccaccaacgcggtggcttcgcccttggcgttgcgggtgatgccctgctgcggcgccagaatggctttgggatcgacgccgttatccaccgtggcatggacatacatgccgggcaacagctcatgttcggggttggggaacaccgcgcgcagcgtgaccgaaccggtggcctcatccaccgccacctcggtcaactccagcttgccggggtgggcataagacgtgccgtcctccagcttaatggcgaccggcgtgaccgcgccgcgctgtaacgccgcctgttggcgccgcagtttaagcagttgggcgctggactgggtcagatcgacatagatcggatccagcgcgcggatggtggccaaggcatcggtctggccggcggtgaccagcgcgcccggcgtcaccgacgaaataccgatgcgcccggcgatcggcgcacgcacctgggtatagccgagattgatgcgcgccgtctccagcgccgcctggtactgcgccaccgccgccacggcctgcagatacgcggctttggcgtcgtctgcgtcctgtttggaaacgccgttttctttgaccagcgccgcatagcgctgcgatttgagccgggtggattgcaccgtagcctgggcgtttttcaactgggcggcggcctgatcgtagctggcctgatagctggcggggtcaatttgatacaatacttgcccggctttcacctcggccccttcggtaaacagccgctgcttgatgataccgtcgacctgcggcctcacgtcggaggtcatggtggcgttgacccggccggtcaactcgctgctcagggtcactgactggccgcgcagcgtgaccacgccgacctcctgctcaccgcctgcgcccgccagcgcaccggcgttttgcccatcgcagccggccagcaacagcgacagccccagcgctaaaagcgttttcctctgcattgcaatacgatcctattgagaatgactattctcaatatatcgaatgccgcaatgcgcttctgaaagggttgcgtaaggattgcgtaaaatcttttcgggctggaaaatgcgcagcgcggtgggtttatcctaatctgcgcgcaagcgtcagcgccaaaatcgtggcgatgctgatacccgccgctcccaggaaaacggcggatgaactgccgggaatgaacgccataaaggatgacaagaactggccggagaaaatcgccatcgataaataggccagatttcgcccccgggtgcggggggagcttttttctacggtcatatgattaaccaacggcaccgagaagccgaacccgcatcccatcagaatgccgccggcaacaaatgccgcggtgccgtgcgcagaggcgaagagcagatgcgctgcggcataacagacaaacgccgcgccaagcgcgccgttttctctgagtaaagccaccaacctgggcatcagcgcggcggcaaaaacggcgataagcgagataaacgacaagaagtatcccgtttgcgccgccccgatattcatgtggtggaaatgctgcgggatgataatgatcccggtgaagaagcagatcatggaaagcacagcggaaaaatagaccgcggttaatctgccggcgccggtggaaatggcatcatcgcgctgaacgttgtctgattcgcccacatcggactggggtttgggcacaaacagcaactgcatcgccagcaacacccaggcgacaagatacaacaggaagggccagcgccagccgagcgtcgccaacagcccgccgataaacagaaagatgacgccgcccagctcgatcgacatgccttgcgaagcgatcattttcaagcgcgcctgcccgctgtaaaaagcagaaatcagaccggtgccggctgacatcacgatcgccgtggcgccgccaagcagcaggcggtcgagcatcaccggccaaaagccgcgcagcaacagcccccccgacccaagcaggccatacaacaacagcccccagctgagcgccgcgtaagcgcccgccttgtcaataaaacgtccggcgaaggggccaaatatcaccacgcccaacgacggcacggtgaccagccaactggccgcggaaggcgtgcccaactggctcgcgatctccgtcaaaccgggaacgatcacgcaaccgaccatgatcgtcagacaggccacggccaagagcgtaaacgccgccatttttcttaattcacgcatagagtgccccactgaaatatccgatatatggatatgatatccacaattcggacggtattcttgaggcttctgcccaacatgtcaacgcgcgaactgtaaatcgaatgtcaatcctaccctgccaacgtcggcaactctccagttattacctgcaatggctggcaggcgctttttggcaatccatgcgctttgtcactcaatgagcgttgacatcgcctacatccggcaacagaataataaccactattcggatgagtgatccattattcggataattcgaaatcaatatcaaccacaccacatctcgctgccgtcaagtcggcgacaacctaagtgaggatctcatgagtaaagaaatttcacgtcgtaatatcatcaaacgcattccgctgttggctggcggcgccttgctttctcaatccctgctgtcttccgccatagcggcgccatcatccgccctaccggcggcgacgcggaaaggcgcgtttactgatgcgggcgcatcgctcgataagtcattgatttcctactatcaggtgccgatgcagaaacgcttgaagatcaatgagaaaggcattcagggcaagccctacgccgagttcttcgacagcaatctggatgcacccgtagagatgatccgcgcgctggaacaggggccgttggcaaaagaacacattcttcaacccacgaaagcgggcctgaaaaccctattggaacgttttgacgagtttccggtatcgggttacgccgtcgttgaggatggcggcccctgcgcctatgcgcaaagccgccatatttttccgggcgtgaccacggagatgttcaagtggtggttctgctggcacccgatcgaaagcgaacgctactatctgtggttccctcatgctcatatccacaactcggttgtcgatcccaagcgtctggcggatacccgtctgtcctacgctgagcggctgtacggcaacccgaaccacattaccgagtacattggcgataactatcttgacggcgttatccattttaatgcgccggaaagcttcggcgtcgagagcgagttgctcaaaaagcatcgctttacctttaacgccagcggcatcatcacgccttatgatgcgcaatcaacgccgctggtgctgatgattcatctgggacgcgacacgccgcaagggatggaaatggtcaaccgttactggatcggcacgcatgaatcctgggatagattcgacaagttcccggacggcggaaaacgctcgcgcgaatacatcgcaaaagcggggatgacgaaagcgtcgctggaagactttgcctatgaaatggccgtccacgatatgacggagttctcttcgctcggccgttttctgcctgagatttatgcccggttcggcaacagctgaccgccgccttccctcgccaacgcagcgccgggagcgaggcgtgctggccccggcgttcagcgcctgccgggccaaacgccccggcttgttatgccagcatcgcttcgatttccgctttgcactgcatcagcgaaccgagcagatggtcaaacttttcctcgaagcgcatggccggaaccgcaatggatatggcgtaaagctcgttgacgccgatattgaggtaaacgccgacgccacagacgccgcgagcgtgctcttcgcgatcgatggcgtaacgacggatcctggtttcccgaatgtcctccagtacggatgagacggttctgagggtattatccgttctgacatccggctggccgccaagcagatccgcaatcttttcgtcaggcagctcggccagaatggctttgccatgcgccgtgcagtggcacggaaaggcggtgccaacggctgatacgacgcgaagttcctgatcggaaacaaactggcctaccgataccgcgtggctgccgcggtaaacgcacaaatcgacggtttcacgcgtgcggcggccaagcgtttccatcgccggttttgcaagggtgatcacatccgtatgcgcggaagccgccaggcgggcgagcgccggccctaattgaacgccgccgctgcccatgatgagcagctgttgcgattcaagcgaggtgaccaaacggtgtacggtggtgcgcggcagccccgtttcccgggacaattgagagatggtcatgcccttcggttgagtttccagcgcccgcagcagggtggcggcccgggcaatcacctgtgagccgctattatccgcgtcattactcatcgtgatgttccacattgaatggggtcagggacgaaagaatatcacaggttgtccacatattggataggtggacaagatccatggaaaatcccccgcctacctgcctcatcacagataccaggaatttttagagcaacacagtgagataaaagcaatagctcccccccatgatattcaggatggcagtctgcccatgcttcatcatcgcgcaggcgcctacgccaacagcctcgcgtgcctacggctttttacggcttcgccaatctgaacaccgttttggtgtgccaatagtagtcgatcgccgccgcgatattcggcatccaagcgtccggctcatagggcacgaagccggaaaaacccagcctgcgggcagagacctggaaccccgcgccggagaaaatgcgtgcatagtcgtccagcgagcgatcctgcaccacggtatgcgtctgttcagcgacccttgcgcgccattgcggccacagcgggttgtcggtgtggcaaccggtcaccgcatagtaaacgccgcccggtttcagcgcccgcagcatatcggcggcatgctgcgcgatatcttcgatcaggtagatgacttcatggctgaaagcgatatcgaaatggtcatcccagcctgtcagccgcgtgtcggtttgataatcgatcggcaggtttcctttcaggcgattggcgtgttcgacggactggcgggcgatatcgacgcctagcccttcacgaaatggccggatttggtgcaacagacgcagaaaaccgccctgattgcagccgaagtccagcaccctgacgccggacagttcgtgttccggcaccagagttagcagatgccgccagataggcgcatggccttcggccatggcctgctctgcgtgcggatcgcgataccaggtgggaatgctcaaggatgagtcgttcatgatggcctccttatgtttccactcagccaaccacagcctatggcgacaaacaaccgtgcgcgcattttttgaacattcactgctctggtttgccatgcaccggcagctggctggtcacgcagtgaatgccgccgccgccggccgcgatggcgtcgatctccaactgcaccaccttgcgctgcggatagagcgccgtcagcagctcaaacgccgctttatccgcctgcggatcgccaaactcaggggcgatcaccgcgccgttgatcacgaaatagttgatgtagcccgccgcaaaatcgggattgtggcggctgaaacggctgtcgcgcggtgccagcggcggcgaaagcgtatgcacctgcagcttgcggccgtcggcgtcggtcgctgccttgaggatcgccagatgcgcctgggtaaccgcatgatcataagaggccggatcggtgtccaggttggccaccaccacgcccggccgcacgaaacgggcataaaaatcgacgtgggcgtcggtgatgtcccggcctttaatgcccggcagccagataattttgcgcaggccgagcatcgccttcagctcctgctccacccgatcgcggttccagcctggattacggtttgcattcacccaactgctctcggtcatgatgccggtgccgcgcccatccacctcaatgccaccgccttcccccaccagcgcgctgcggcgcggctgagcgacaccgtattttttggcggcgaacgccgccagacgcgcatccctggcatgccgctgcttatcgccccagccgttgaagttgaaatccaccgcgcccagcgcaccggcgtcgttgatgacgaaattggcgccaatgtcacgcatccagatgtcatccagctcggtgacgacatagctgatgttctgactgccgcaggtggcctccgccagctgccgttcgtgcgcgcggcaaaataccgtcagcggctgaaactcggcgatggcgcgggcgatgcgcccctgcgctgcctgcacgtccgccgtgaacccgccccagatggccttctgggcgccgaaggcgagaaacgcccgcagctggggttccccttcgtcgggcatccgccaggccggattaagcgcagcttctgcgtgaccgcgtaatggaaagcccaacgatgccgtcaagccgacgccggccaccgccgaaagctgcttgatgaaggtgcgacgcgatgacataaacgacctcttttaattaatttaaattcaaatggttaaccgaattcttcactctccggcacttgaatcccatgctagtcttcccctgccaccgcgacaaacgatatatttagtggatatctgattagacaggcttatcgataatgttaaaacactggccccctttgagcgcactgcgcggtttcgaagcggcggcgcgcctgggcagttttcatcaggccgccgaagaattgcacctgacccagtcggccatcagccaacagatccgcagcctcgaggcgtttttggaacagccgctgttcttccgcaccggccgcagcgtaacgctgaccgacgccggccacgatctgttcagcaccgcacaggtgatgctgcaacagttggccgtcggcattcgccgtttggatcagtaccgcaaacccaaccagctgatcgtcaacaccaccccggcctttgcccgccactggctcgcgccgcggctgggcgagttcaaccagcgacatccgcagatcgatctgtggctgttcaccagctttgaaccgccggatatggcgacggacagcatcgatctggcgatccgcgacgatctcagcgcgcaggcggactgcacctttaacgttctctgtaccgaccggctctatcccgcctgccaccccagcctgctggcgttggcgccggagcagcgcgtgaccttgcacggcgaacgcgagatggactggagccactggacggtggcgggcggcgcgcacgtcggccaacgcgacagcgggctgaacttctccgatcctggtctgctgctggacgccgcctgcaacggcctcggcatcgcgttggtcagtcagctgctggcgcaacacgcgcgtgaggccgggttgctgcacccgttaaccgagcaacgcgtgcgcggcgccaactgggcgtggctgctgcatcgcgacagcgaacacaatccgctcgcccggcacttctgccaatggctgcagtcggcgctgcccgccggcgcataacgcgtcacgtcacgatttgctactctggtcaggcgaccccgcctgaccgctgctaccttcaataaagcgccgcaacagcccgaagaaaacgcgctaacctgctgtttcaaaaataattagttgaattcacctgataactgaacatcgctaaaaggatcttctatgtctgccggtttattgaaaacgatagcgctgagcgtgacccttgcttgctcccttcccgccgcctttgccgccgatctgaccgccggcgcggtcgccgccccggatcagtatggcgccaaggtcgccgcgcacattctgcaggccggcggcaacgcggtcgacgcggcggtcgccaccgcctttaccctcgcggtgacctaccctgaagccggcaatatcggcggcggcggctttatgacgctgtacgtcgacggtaagccctattttctcgactaccgcgaagtggcgcccaaggccgccagcaagaccatgtatctgaacgagaaaggcgaagtgatcgaaaatctcagcctggtgggcagccgcgccgccggcgtgccgggcaccgtgctggggttgtgggaagcccacaagcgtttcggcaagctgccgtgggccgaactgctgacgccggcgatcggctacgcccggcaaggtttcaccgtagcggatcagcagtatcagtaccgtgaagacgccaacaagctgttcgccggtaaaaccaacttcggtgactatttcggcgccatgaagcccggcacggtgttcaaacagccggagctggccgccacccttgagcgcatcgccaaatcgggcgccgacgatttttatcacggcgaaactgcccgcctgctggtggcgcaaatgcagcgcgacaacgggctgatcggcgcggcggatctggccgactaccgggtgaaatggcgcgaaccgatgcgcatcagctggcgcggcaacaccgtgtataccgccccgctgcccagctccggcggcatcgcgctggcgcagctgctggggataaaagaagatcgcgccgccgacttcaaggacgtgccgctgaattcggcgcgctatatccacctgttggcggagatcgaaaaacgcgtgttcgccgatcgcgccgactacctcggcgatccggatttcactaacgtgccggaagcgcagttgatcgcccctgattacctgcaaaaacgcgccgccgagatcaatccgcaggcgatctcaccgaccgagcaggtacggccggggctggaaacccaccaaaccacccatttctcgatcgtcgatgccgccggcaacgccgtcagcaacacctatacgctcaactgggacttcggcagcggcgtggtggtcaaaggcgccggcttcctgctcaacgacgagatggatgacttcagcgccaaaccgggcgtcgccaatgcctttggcgtggtgggcagcgacgccaacgccattgagccgggcaaacgcatgctctcctcgatgagcccgaccatcatcacccgcgacggcgacgtcaccctggtgatcggcaccccgggcggttcgcgcatcttcacctcgatcttccaggtgatcaacaacctctacgattaccacctgccgctggcgcaggcggtggccgcccagcgcgtacaccatcagctgttgccgaaagacaccgtctactatgacagctttgcgccgctgaccggcaaaccggcggacgagctgaaggccatgggctacaccctcgaagaccagggctggaacatgggggatattcaggtcatccgcatcgatggccgcacgccggaaaccgcgtccgatccgcgcggccgcggcgtgggcctggtggtgaaaaagtaacgccccggcggcccgcctcaggttagacgggccgctacttccccgcattgactgccgctgcgccctttcttactcatctatactgaagcgacaggctcgcgtttgacgacggcggcgtctgccttccttcttagacgataacgacaatattaattttaaatcaatcacctgcatttatcgtaagcggtgtcggaggcaatcaataatggcgaaaagacgagcagtacccggtgtccatccctacgatgggcccgccggcggttggggcgcgctgaaagcgacggccatcgccgtgcgcacacagatggataccctggaagcgccggtgacgctgatgcgtaccaaccagcccgacgggtttgactgcccgggatgtgcgtggccggataaagagcatcgctccacctttcagttttgcgaaaacggcgccaaagccgtgacctgggaagcgaccagcaagcgcgtgacccccgaattcctggcgcaaaataccgtgacctcactgctgcaaaaaaccgattatcagttggaggactacggccgtctgaccacgcccctgttttatgacgccgggacggacaccctgcgcccgctggcctgggacgaggcgttccaacgcatcgccgccgtcttgcagacgctgccgccggaacaggtggaattttatacctccggccgggcgtccaatgaagcggcctacctgttccagctgtttgcgcgtgaatttggcagcaataactttcccgactgctccaacatgtgccatgagccgaccagcgttggcctgccgcagtcgatcggcatcggcaaaggcactgtctcgctggacgactttgacagcgcggagctggttatttccatcgggcacaacccgggcaccaaccacccgcgcatgatgggcacgctgcatgagctggcgcgcaaaaaagtgccgatcattgtgtttaacccgctgcgcgagcgggcgctcgaacgtttcaccgatccgcaaaacgtcatcgaaatggcgacctacagttcgaccccgatcgcttcaacctactatcaggtcaaagccggcggcgatgccgcggcgctcaaaggcatcgccaaagcgttgctgcagttggatgatgagcatggcaatgcgctggatcacgcctttattgccgagcacactgaagggtttacggctttcgacgccgatctgcgggccacccgttgggaagccattgaggcggaaagcggtctggcgcgtcaggatctggaacaggtcgccgccgcttacgcgaaatccaacgccaccatcgtgacctacggcatgggcattacgcagcacaataaagggacggccaacgtgcgcctgatcgctgacctgctgctgctgcgcggcaacattggcaaaccgggcgccggcatttgcccgctgcgcggccactctaacgtgcagggcaaccgcaccgtcggcatcaccgaaaaaccctcggccgaatttttggcgaagctggaaacggtgtttggcttcacgccgcccaaagcccacggtcacgatgccgtgaaatgcatgcaggcgatgatcgacggcgcttcgaaagcgttgatctgtctgggcggcaacttcgccgtggcgctgccggaccccgagcagagcttcccggcgatgaaagcgttggagttaagcgtgcatatcggcaccaaactcaatcgcagccatctgttggtggcgaaagaaaccctcattctgccctgcctgggccgtaccgagctggacctgcaggccggcggacggcaatcggtgacggtggaggattcgatgtcgatggtgcatgcctcgtccggcaaattaaaaccggcgtcggaactcctgcgttcggaacccgccattgtggccggcatggccaaaacggtgatgcccgccagcaaggtgccctgggatgagttggtcgaggattacgacgtgatccgcgatctgatcgaaaaaaccatccccggcttcgacaattacaacgcgcgcattcgtcaacccggcggttttcgcatgccattgccgccgacagaacgccagtggccgacggcgacgggcaaagcgatgttttcggtgttcagcgggttgcacgaagaccagattgcggcggaacaaaatacgctgcggctgatcaccctgcgcagccacgatcagtacaacaccaccatctatgccctggatgaccgctatcgcggggttttcggcaggcgcgatgtgctgtttatgaatgacagcgatctgcaacgtttggggctggagcatggcgacgtggtcgacctggaaacggcgctgcccggcagcacccagcgcctggaaggcatcacggtgatcgcctacaacatctcggccggatcggtcggcgcctactacccggaagccaacgtgctggtgccgttgcattacatcgatgaggagagcggtacgccttcgtacaaatcggtgccaatccgcgtgaagctaagatccaaagaggtgcgcgcggttaagatcgcttagtaggaatgctttggcccccacaggcatctgattgggggccatttttatccgactacggagcggcgtcctatttgccgttggccaattcaccgtacaccacctggccgcggaaaccgcgccgcacctgctggaacagctcgcggaacgccgggtaatcctgcgcctggcacagcgcttccttgccgcgaatggcgttcacctgcaggcggtgattgacggtcacctgctgcccgtcgcgccgccacgcgacgcgatagtcgcccgccgcattgcggaattgccgatctttcggaatggcgatgatcggcacgttggccggcagctgcagacggtaggtttcatcgtagcgctgcgcggtgcagtagaacggcgtttcgttgcccggcgccgccgtggtggtatacagcgtgcggaacgatttgccgccgggcgggttgggcaaggtcatgccgcccaccacgccgaaatcgacgtagtcgtccgccttgaagcggaagcggtaaccgaactgctttttgagatccagcggatcgctgttcatcgccacctcgccgctgccgtcgatgccggatgcggacatgatcgtcgcttcggcctgcgcccggttctggcggttgatctgcgagaagtagccccgcaggtcaatctcttccacttcgctcagccggcgctcggtttccccctgcaggttgcccgccttgtcgaacacgaaatcgacgctcaacgcgctcttgagcggctgctcgtcgctgcccggcgtgcgcgccagtttggcgtcgcgcgtcagcagcaccggcgcccccaggtcgccctccggcagttgcccgaaacgcgcccagggattggtggaatcgaggtacagtttgaattccggcacgtaggtgatggcgtgattgaagcggccaagcagcggcacgttaggcagtatcgggccttcatccatgccgatcagcaccggcgagctttcgatgcccttggcggcgagcagcgcctccaggatcaccacgtgatccttacagtcgccgtaatggttatcgagaatgctctgcgccgaattcggctccagcccaccattgcccaggtacaccgccacgtagcgaatgttttgcgccacccagcgatagagggcctccgcctgctcgcgccgatcgctgatgccggcggtaatgttgtccgccagcgcctgaatgcccggcgtcaccttcgccgccgcgccggccttcagctggtaggccttggccaactgcggccaatcgcggtaggtgctggccatgatggtcgggctgaaggtccagctgtccgccgcccagttttgcgccttcatcggcgcgctgcgcgaataatgccagcgccagtgcgcttggccgttgcggatctgcggctgggcgccgcccgccacgccgcgggtgaaaatatgcatcggcagcttggccggcgcctgcagggtcacttcggcgtcgtcgaactgatcgaaaacgctgaacgtctcccacaggccgaaatagtcggggaaatacggggtgttttgcgtgcggcgcagctcatacaccacgcgcgatcccggcgccaggttggagaacacgatgacgcgcactttgcggtcggcatacagcggcgccgtggcgctggagtagctctcctgggtgtagatgcggtcgggcgccacgtcgtggcgctggccgtcggcggtcagcgtataggcggcgaccacctcgagcgtttccattttttcgctgtagctcaggcggatctggctgaatttctcgatcgccgccttggtcttcagcagcacctcgtagctttccgtcttcacgttggtggcgttggcgttaacgcgataatccgcgcgatagcgcacgaagctgaaatcgttgttggccgtgtcgttctggccctgatccgccgcggcgggcggtgcagcggccaacacggtggccgggtgcgtcgccgtcaaaccggcgagtaacagtatggaaggaatagcgattttcatcttcggtccttgaagggcgttaagcagcgacaccgggccatacgtccgtcccggcgtcaaaacaggcgggcacactaatataattgagaatcattttcaataaacgaaccatcaacgcccgggttagccctgctcgatcaacatcacggcggtggtctccggctccagcgcttcgaaaatatgctcgcgatcggcggagtaactgatgtaatccccggcgctcagctccagcggctgatccgccggcccgaggcgcgcgcgcccgctgctgatgatcacatgctcgacggtgcccggcggatgcggcctcgagcatttcgtttcaccgggttgcacccgcagccggtaaatgtcgcgctgcgcgcccggtggacaagtggccaacagcgtggcggcgtagttgccctgctccgacagcgccggcgttccctcatgggcgcggatcacttgcaccggcctgctcggctgtgaaatcagccggctgaccggcacatccagcgccatcgccagcgcccacagcgtttccaggctggggttgccgctgccggcttcgagctgcgacagcgtggacttggcgatacccgcgcgcttcgccagttcggtaacggacagattcaatcgctcccgctcacggcggattgccgccgacaagaggccaatcggcgtgatgttctgcattaggctctcgctcattgttcgttataccattcaattgttcgtcttgacgaacagcgccaaccgtgttcatcataatgttcgattgttcattttaatgattaagcgacttcaccacaagcacggtcaggccgcgagggaaacgacatgaaaacgaaaacgcgcggcgcagtgcaaatgatcctcgccatgacgatctccggcaccgtcggttggccggtgatcgtgttagggcagccgcccgccacggtggtgttttggcgctgcgcgttcggcgcgctggcgatgctggccacctgcgccgcgcttgggcaactgaaatcaggcgccatcaaccggcggcagctggcgttcgccgtcctggggggcctcgcgctggtgctcaactggacgctattgtttgccgcctatgcgcatgcctcgatcgctgtcgccaccgtgacctaccatgttcaaccgtttatgttggtggcgctgggaacgctgctgttcggtgaaaaactgacggctaatcggctgggctggcttctgctggcgttcgcggggatggtgttgatcgtcaccggccggcagagcggtggcggcgatggcgactatctgttcggcgtggcgctggcgctgggcgcggccctgatgtacgccctggcggcggcgatcgtcaaacagctggccgcgttgccgccgcagctgatcgtgttgattcagctgaccgtcggcgcgctggcgctggcgccgttcgccggtctggcccaccttcccgcagattcgttcgactggctgctgctggcgaccctcggcctggtgcataccgggttgatgtccacgttgctctatggcgcgatccagaaaatccccaccgctctggtcggcgcgctgtcgtttatctacccggcagtggcgatcgtggtggactgggcggcgttcgggcaccgtctcagcctgttgcagctgctgggcacgctggccattctcggcgcggcggcgggcatgaacttcggctggcgatggccgcccgccgcgcaccgggccggtaaaatcggttaatcccgcctgacgggcaagctatgcacaataaggcattcgccttgtgtccggcgcggtgctatttatttaaaccgtgtagggtagaaggagtgttctatgtggcatcaccgcctgcaacggcgcatccgtttcagctactggaacgaactgtgcgtcacaaaaaaataagggaaggcggaagccttcccttttgtcattcaccgctcgggtcaaaaacggtcggttttcaccacctcgtcgaacggcagcttgccgatgcgcgggtaaggttgccccgccgccttgccgatagcgaccatcagcgcgatctgataatgcgccggcttattgataatctcgcccaccgcgtcgaaatcaaaaccgtccatcgggcaagagtcgtagccctgcgccttggccgccagcatcagcgtctgggcgaagatgccgctgctgcgcatcacctcgtcgcgctgcacctgcggcttaccgcgataatactgatcgacggccgggatcatgaattgctgcaccggctccgcggcctcggcccagacggtttttacctgtgactcccagctcgacagatcgccgcacagcacgaccagcatcgacgcgtcggtcacctgcgcctgcccccacgccgcctcgcgaattttctcgcgctgcgcgcgatcttcgatcagcagcgggcgccagtgctgcaggttaaacgcgctgggagcgccctgcagcgcgatagtcagcaacgcttttttctcttcgagcgtcatcacgtgctgcgcatcgaactgcttggtggcgcggcgctggcggattgcgtctaacgtattcattttactgcctctgtccatgtgaaaagctctattgtcgccaacgcggcgtggctgtccagcccccggcggctatttctgctcggtttcggcgcgcaagcggccgacctgcgccgccaggtccggccacggcgcctgaccggcgtaatgctgccgcaggtagttgagcaggatggcgatctgtgcgtcattcaggttatggcgaaagcctggcatatagcccagctcggcgttcgccggccgctgtatgccgtccagcaccacgcgaatggcgttgtccggcgcctcggcgaacaggttggtgttcagcgccagagacggccgcacccccgccatctgcgcgcctttttcctgcgcatggcaagccatgcaggcgccggaaaacagccgtgccccttgcgaactcaggggctcgacctggcgctccgcctgagcgttcaaggttgccgccgcggcctgcgccgccgcttccggatgatagctgcgcagatagacggcgatcgcctgcagatcggcctgcgacaagcgcgacagcccttcttcgatcaccggcgccatcggcccggcggcgacgccgtggttggccgagtagccggtgcgcatgaaatcgaccagatcctgctgtgaccaggcgagcggcgcgggcgagcggccggtcaacgccggcgccgtccagccttccgccacgccgccggccaggtgctcgccgccggttttctcaccgaacagcacgttgcgcggtgagtggcaggcgctgcagtgccccaacccttcgaccaggtacgcgccgcggttccagtcggcgctttgggctggctgttccggcaacgcgcccggcgtcaggaacagcaggttccaggcgaagatgccctggcgaatgttgaacggaaagtgcagatcggtggccggcggccggtacttgaccggcggctgcgacatcagataggcatacagcgcctgcagatcgtcgtcgcgggtgcgggtaaaggcggtatagggaaacgccggatagagatagcggccctggcgatcgacgccgtggcgcatggcgcgttcgaacgccgcgtagctccagctgccaatgccggtttccacgtccggcgtgatgttggtggtgtaaatggtgccgaaggggatctccatcgccagcccgccggcgttgcgctcgccgcccgcacgggtgtggcacaccgcgcagtcgccgagatcggccaacgttttgccacgcgcgatctgcgcctcgctgaaactgtgggtcgcatcggcggcgagcggcgcaatctccggctgccaactggcgaccacgccggcgactaccacggcgatcaccgtgacgccgccccacccgacgatttttttcatcttactcatctttgctgtccttgttcgttacggggggttaatggccggcctgagcgcgcagcgcggcgagcacccgcgccggtgtgaacggcacctcgcgcaggcgcacgccgagggcgtcaaacagcgcgttgccgatcgccgccgcactcggcaccgaggcggactctcctgcgcccatcggcgcttcgtccgggcggtcgatcagctggatatcgacctgcggcaattcgtcgaagcgcaggatcggatagccgccccagtccaatgacgtcacgcccgacgcgttgaaggtcacaaactctttcagcacccggctggcggactggataatgttgccgtgcacctgatggcgcaccccggccggattgatcatccggccgcaatcatgcgccacgaagattttatcgagcgtgatctgcccggaaaggcgattgacgctgagatcgcacacccaggccgcccaggcggcgccgaagccgggaaatttgctgtggaaatagcgcgcataggcgaagccgcggccgctcaccacttcggcgccggcggcgcgcgaccggtgcgccgggccgtcttgccagttcgcctggcgcttcagggcctcaatcaaggccactgcgcgcggatcgttcaggtaacgcaggcgaaacgcgatcggatcctcgccggcgcgccaggccagctcgtcgatccaggactcatgggcgaacacgttgggcagcgccgaaacgccgcgcatccacgaggcccgcacgatcggcgcggcgtcctggcaaatcacccgcatgtgcggatactcgtattgcggaatggcggtgcgatcgcccatctgttgcacgtcagcccggttggccaccttgccggtcaacaccagcggcaaggtcaccgcattgttggagggatagctggttttcaactcgtaggccgccactcggttttgcgcgtcgaggccgccgcgtacccggatcaactgaccggtgcccttcggctcccagccggattcctgttcgcgcatcagctgcacccgcaccgggcggccggtctcccgcgccaacagcgccgcgtccgccgagacgtcgtcggcgcagttgcggccatagcagccggaggcctccatgcgggtgatgtgcacctgctcagacggcaactcgagcagcctggcgatatctttgcgcagatcgtgcgggttttgcgtgccggaccacacctgcgcccgcccgtctttaacctccgccactgcgcaggaagggccgatcgaggcgtgctgatggtaaggccagacatagtcagcccgcacttcggtatgcagcaatgccagcgcgtcgtccgtgcccgcatcgtcgcgcagcacgcggtcagttttcgggttggcttccagtgcggcgggcagcgcctccggcgacaggtccggcaggccggcccagggtttccattcggttttcagctggcgcatggcggcgatcgcctgctcttcgcgctcggccacaatgccgatgaaatcgttgatcaccaccagtttcacgatgcccggcagatgcgcgatcgaactttcatccaccgacaacaggccgccgcccagcggcgcgctgctgtcggcgcctgcgtaaggcgggcgcaccacccggccatgcagcatgccgggcaaacgcagatcgtgcacgtaggtcagcgcgccgctcactttggccggaatatcgacccgggcgacggcgcggccgacatagcggttctgctgttcaccgttcagcggcacgtttttatccagcgccacgtgcagattctgcccgcttgccagctgcgcatagctcaaggaacgccccgggtgcttggtcacaaacacctgccccgccgccgccgtcagctggtcggccggcagttcgaaggctttggccgccagcgccgtcagcatatgccgcacctgcgccgccgcctggcgcagcggcaccgacgtcacctgaagggtggcgctggcgatagttggcccctgatccggcgtgcgttgcgtatcgccgaggatcatcgtgacgtgctcgaacggcacgcaaatttcgtcggcgacgatctgcgccagcgcggtgcgaatgccggtgccgagatcgacatggccattgaaggccgtcacccggccgtcggcggtgaggctgataaaactgtctaccctgtccagcggcagatcggcaggcgttggggcgggctcggcggcgaaggcgttaaacggcgcgggcagcaggctgctgaccatcaccacaccgccggcctgcaacagctggcggcgggtcagttcgaggcggctcatgcttgcctccgtgcagccagcagcgcgcgggcgcgttcggcggcgcgcaagatctcaagatgggtgccgcagcggcacaggttgtaggccagctctttcttgatggtttgttcatctgcatccggctcgcgttcgaacaacgcgaccagcgtcatgatcatgccgttggcgcagtaaccgcactgcgccgcctgctcatcgataaatccttgctgcaccgggtgcggcgtttccggcgtgcccaggccttccagcgtggtgacggattttcttcctaccgcggccaacggcattgagcaggagcgagcggcgacgccgtcgataagaacggtgcaggcgccgcactcccccaggccgcagccgtatttggggccattcaagtgcagatcgttgcgtaacacgtacaacagcggggtctcgggcgagatatcgccgagtggaaccacccggccattaacattgatttccatggtgaaactatcccttaaacaaacggatttaatccgtaacatcactgcggcgaataattgcgcagtgtgctaataattatcatcaaaagacttgataatgttaagggaatgtagccgccatggctttaacgaaaagtgggtattttctataaatttccgatagataagcccggttttatgattgcgtcccgtgattattggcgttcgtcaacgcggcctcggcaccgtcgaccaacagccgcacgctggcttcgaacagcgcgtctgcacccttatcctgcaaagtttcccagccttcgcacagcagcgggtaacgctggcgatcggcgtcattcagcgtatcgtccggctgcatttgctgctcttccagcacccagcctacgacgaagcgcccgacggcgaacagcaaattcaccgcgcgttcaggcgtcaagcccgcccggcacagcagcgccaccttggcctcgataatggcgaattgcggctcctgcggccgggtgccggcatgcagacgcgcgccgtcgcggtaagccagcagcgcccgacggaaattgctcgcattggtgacgacccaatcctgccagggcatgtcggcgggcacctcttcacggtgatccagcatgatggtttccgccatcgccttcagcagctcggccttgttcttgaaatgccaatagagcgtgggagattgcacgcccaaatgttgcgccaggcgacgggtgctcagagcatcgatgccgatttcattcagcagcgccagcgctccgcgcaggacggtttcacgcgttaaacgtatcgtagtatttttttcactcatctctctatcactgatagggtaactatggaatactcaatactctatcactgttagagtcacaatcttgaaaaaacctatgctggttattttgttgacggtgttgctggatgcggtgggcatcggtctgatcatgccgatcctgccggtgctgttgcgctcgctgggcggtcttgacgccggcagcctgcattacggtgccctgctggcggcctatgcgctgatgcaattcctgttttcaccgatcctcggcgcgttgagcgatcgcttcggccggcggccggtgctgttaatttcactcgccggcgccgcggccgactacctgctgatggcgttcgcgccgacgctggcctggctctatctgggccggttgctggcgggcatcaccggcgccaacatggcggtcgccaccgcttacgttaccgatattactcctgccggccagcgcgcgcggcgtttcggcctggtgggcgcggtgttcggcgtcggctttatcgtcggcccgctgctcggcggttcgctgggcgagtggcatctgcatgcgcccttcctggcggcggcggcgatgaatgccctcaacctggcgatggcgtttttcctgctgccggaatcgcgtaaaccccgcacccgcgccgccgagaaaatccgcctcaatcccttttcgtcattgcgacggctgcacggcaaaccgggcctgctgccgctggccggcatttatctgatcatggcgctggtttcacaggcgccggccacgctgtggattttatacggccaggatcgtttcggctggagcatgatggtggcgggcctgtcgctggccggttacggtgcctgccacgcgctgtcgcaggccttcgccatcggcccgctggtcgcgcggctcggcgaacgcaaggcgctgctgatcggcctgaccgccgacgcgctgggcctggtgctgttatcgatcgccacgcgcggctgggcgccctttgcgctgctgccgttcttcgccgcgggcggtatggcgctgcccgcgctgcaggcgttaatggcgcacaaagtggacgacgatcatcagggcgagctgcaagggacgctggccagcatgggcagcctgatcggcgtcgcggggccgctgatggcgacggcgctgtatgccgccacgcgtgatgtctggcccggcctggtctgggcgttggccgccgccctctatctgctggtgccgccgttgctggcgcgttcgcgcgagcgtgacgcggcatagcgtagagatccccttctcccgcttaagctcatttatggctaagcaaggcattattcagcataagcgggcgctttacacgccagtgcgccgctcattatcatcgcccttatcccgccgcaggaaaatttgaatgccgtttcatggcgttacgcccagcgcgtatcgctattgttcacttcgcctatcggaaaatcaggatgagaaaactcacaacgccgctgatcgccgccctgctgctgggcctgtttagcctgccggccggcgcgcaggagaaaccgcagcaaatcaccatcggttaccagaaagctaacatttttgcgctgctgaaataccgcggcacgctggaaaaagcccttgagccgcagggcgtcaaggttcgctggatagaattccccgccggcccgcagatgttggaggggttgaacgtcggcagcatcgatctggcggcgaccggcgacgcgccgccggccttcgcgcaagccgccaaggccgatctggtttatttggcgcattcgccgcccagcccgaaaaccgaagccatcgtggtgccgcaggattcgccgatccgctccgtggccgatctgaaaggcaaacgcgtggcgttgaacaaagggtctgacgtcaattacctgctggtgagcgcgctggaacaggccggcttgagctacaaggacatcacgccggtctatctgccgccgagcgatgcccgcgccgccttccagcgcggcagcgtcgacgcctgggtgatttgggatccctactacgccgaggtggaaacccgcgccaacgcccgcctgctgaaagacgcggagggcctggtgccgcactataccttctatctcgccagccgccgctttgccgaaacctacccggacagcgccaaacaggtgattcaacagctcggcgcgctgagcgactgggccaacgagcatccacaggaagcggcggcgatcctcgctcagagcaccggtctggatcaggccatttgggccagagccatcgcccgcatgccgttcggcagccagcgcatgtcgccggaggtgttcagacagcaacagcaattggcggataaattcaccgccatcgggctgctgccggttaaggtggatgtcaacgccgcccgctggtccgaagataagcccgaggcgccatagcctttgccgcgctttggttttagaaagcagaaaccggcattttgccgccggcatcagctggcctatgctaaccttgtgtgatgaaacgcggtttcatggcatgtcttccggaacgttttgctttaatttgttcgtcgtgaaccctgggccgcccctgactggtgcggcttttctttttgttcggcagtgccggcggcggcgaattttgctatggtaacccgcagataaatgtcccgttttcagccgccggatcaacccatgtttacccataaagcaatcgccgagctcaacgccctggagctgatggtttataactacgtcagcaaacacaaaaatcaagtgatgtacatgaccatccgcgagctggccgaggccgccggcgtatccaccaccaccgtgctgcgattttgcaaaaaaatgggttgcgacggttattcagaatttcgcatccgtttcaaactgtatctggagcaaagcgatgcgccgccggtcgattccggcatcggcgaaattctcagtttttttaaaagcgtcagcaacgacgaatttaatcagttactcgatgaagcggcgcatcatatcgccgccgccgagcggattattttcgtcggcatcagcacctctggcgccttggggaaatatggcgcgcgtttcttttccaacgtcgggaaattcagcacccatatcgacgatccttattatcccgtcaacagcgatatgtataaaaacgcggtggcgatcatgctgtcggtttccggcgaaaccgaagagatcctgcgtctggccagccaattcagtctgcaccactgcaagatcatcagcatcaccaacaacgaaacctcttcgctggcgcggctggcggactttaatctctcctaccacgtgccgcagcatttgatcggcggccatcacaatatcaccacgcagatccccgtgctttacattattgaaaccatcggcaaacggcttgggcatattaattcggcaaaataaaacaggctgtttttttattgtgacaaatcactttgtccggcgatttgttatatcgtgacatttcttttggtcttgttactctattggcaatgcgaacgttattatccttcattaaataagatgagacattgacgatgaaacagttgccgaaagattttctgtggggaggcgcggtcgccgcgcaccaggttgaaggcggttgggatcggggcggcaaaggcccaagcatcgccgacgtgctgtccggcggttcgcacggcgtcgatcgcgtgatgacagacggcgtgctcgacggctaccgttaccccaaccatgaagcggtggacttctacggtcgctacaagcaggacgtggcgctgttcgccgagatgggcttcaaatgcttccgcacctcgatcgcctggacgcgcatcttcccgaacggcgacgaagcaacgccaaacgaggccggcctgcagttttacgacgatctgttcgacgagttgctgaaatacggcatccagccggtgattaccctgtcgcacttcgaaatgccttaccatttggtgaaaacctacggcggctggaaaaaccgccgggtggtggaatttttcgtgcgctttagcgaagtggtgatgcgccgctaccgcgagaaggtgaagtactggatgaccttcaacgagatcaacaaccagagcaactaccgctacccgctgttcggctactgctgttccggcgtggactacacccaggaagacaatccggagcaggcgctgtaccaggtattgcaccaccagttcgtcgccagcgcgcaggtggtcaaactcggccatcagatcaacccggagttcaagatcggctgcatgctggcctgcgtgccgttctacccttattcctgcaagccggacgacgtgatgtacgccgtggaggcgatgcaccagcgctatctgtacaccgacgtgcagatgcgcggctactacccaagctatctgctgcgcgactgggaacgcaaagggctgaagatcgagatgcagccgcaggacgcacagatcctgcgcgagggctgcaccgactacattggcttcagctattacatgagcaacgcgctgcaggccaacgcggtggaaggcagcgacggcatgttcggcttcccgggcaacgtgccgaacccgcacgtcaaggcttccgactggggctggcagatcgatccggtcgggctgcgctactcgctgaacgtattgtatgaacgttaccagaaaccgctgtttatcgtggagaacggcttcggcgccttcgacaaggtggaagcggacggccagatcaacgatgactatcgcatcgactatctgcgcgcccatatcgaagagatgaaaaaagcggtgattgaagacggcgtagacctgatcggctatacgccgtggggctgcattgactgcgtatcgttcaccaccggcgagtacagcaagcgctacggctttatctacgtcgataaacacgacgacggcaccggcacgctcgaacgttcgcgcaagaaaagcttcgactggtatcgccgggtgatcgccagcaacggcgaacagctttaaccgcacggcagaccaatcaggggcgatgttcgcccctactccgccgtctgcccggcggcgaggtacttcgccatttccgccggcggcaccatgccgccgccggtcgcccacaccagatgcgtcgcctgcgccaggctttccgcgctcaccccttgcccgctaagctgttgcgcattggcctccatgcgccacggcccggccatgcccgccagggcggagggttccagctggatatgctcgtgcctgtccaacaacccgagcaacgcgaacatctcttcgtcgctcagcgtgtaaaatgcgctcagcaggcgctccatcgcccggccgacaaaacccgaggcgcgccccaccgccagcccgtccgccgccgtgcggttgtcgatgccgagatcttgcaccgcaatgccgtcatgcaacccgctgtagacgccgagcagcatgcagggggaatgggtcggttcggcgaaaatgcagtgaacgtgatcgccgaacgccagcttgaggccaaaggccacaccgcccggcccaccgccgacgccgcacggcagatacacgaacagcggatgctgcgcgtccaccacaatgccctgttcggcaaactgccgcttcaggcggccgcccgccaccgcgtagccgaggaacagggtttgcgagttttcatcgtcgataaagaagcaattcggatcgttcgccgcctgttggcgcccttgctcgaccgccacgccgtaatcgtcagcgtattccaccaccgtcacgccattgtcgcgcagcttctgttttttccactctcgcgcatccgccgacatgtgcacgctgacatcaaatcccaggcgggcgctgatgataccgatggataatcccagattgccggttgatccgacggcgatgcggtactggcggaagaactgacgaaatgcatcggaacacagccgggcgtagtcgtcgccgatctggagcagccccgcctccagcgccagtttctccgcgtgcgtcagcacctcatagatgccgccgcgcgctttgattgaaccggaaatcggcagatggctgtcctttttcaatagcagacgcccgcccaacgcctgcccatagcgccgatccaacgcctgctgcatggcggggatcgccaccagctcggactcgatgatcccctttgtcggctgggtttccgggaaggccgcggcgagataaggcgcgaaacgcgccaggcgctgctcggcttcggccacgtcggcggcggtcagcccgacatggggcaagccggcggccagcgtggtcgcacgcggattgaaccaggtgatcggctcgagggcgagcattcgttgcagcagcggatgctgcgcaacccacggttggatctgtgatttttgcataagagtccctgactgatttggcgttgccgtcaccatgccgtgaacgccggcggctgacaaatgataaattctgagtttgaggtgcaatagattgatgcaaacgcggcgttagcctgccgtcacgccaaacagcatgcccacgcctgaggagaccgccatcgccagcgcgctccagatcaggatacgcgccacgcccggcaagatcggcgccccgccggttttcgcggcgatgccgccgagaacgccgagagaaatcagcgccgacgccaccagcgccgctcgcgtccagtcgagcggtgcccacagcgccaccagcagcggcagcagcgcgccgagggagaaactgagggccgacgccaacgcggcctgcagcggccgggcgcgggtgacggaggaaatgcccagttcgtcgcgcgcgtgcgcctccagcgcatcatgcgccatgagcttttccgccacctgccgagccagcgccggatccagcccgcgatgcacgtagattgacgtcagttcgcgaaactcccccggatagtcttcgagcaactccgcctgctcttccgccagcgcggccttttcggtatccgcctgcgacgagaccgacacatactcaccggtggccatcgacatcgccccggccacccacccggcgacgccggcgatcatcagcgcggaatgcgcggcgctggccgccgccacgcccagcagcaggctggccgtcgaaacgatgccgtcgttggcgccgagcaccgccgcccgcagccagccgatgcgttcaatactgtgccgctctcgatgcatcctttctctccttcgttctcttaccgctagccccgcgccgccgcttccaacccggcgatgtcgattttgcccatcagcagcatcgcttccgtgacccgccgcacgcgggcggcgtcgggatcgttcatcaactccgtcaggcgccgcggcacaatttgccagcacagcccccagcgatcgcgcagccagccgcactgctccgcctcgccgccctcgctcaacgcatcccacagccggtcgacttccgcctgatcgtcacattccaccatcacggagaaactgtgattgaacggatccagcggcccggcttcgatcgccgcgtagcgctggtcccccagcgtgaaagaagccagtttcacgctgccggccgggccgctcggcgtatccgccggcaggtcggaaaaccagttcacggacgaaccggggatcagcgcgacatagcaattcagcgccgcttccatgtccttttcaaaccacagatgttgcgtaattctggccatttgcgcctcctttacgcatcgaggatcggcgcgaacccgccaaagatcatgcgtttgccgtcaaacggcatctcaccgagcgccttcatgcgcggatcgttcatcattttctcgttggcggcgtcgcgcaccgctttggaggggtactctatccagctgaacaccaccacttcaccttcttgcgccttcaccgcgccgcgaaagtcggtgagcttgccgtcgggcacgtcatcgccccaacactccacgatgcgcgtggcgccaaactctttgaacagcggcgccgctgcggccgccaaccggtgataagcctccttgttggcggccggtaccgccaccacaaaaccgtctacgtatttcatcctggtatcctcttgtctgattaaggacagtcggttcagcgcgggcgacgttgcctgcgccccctaccagtttagacggcgggcgcgcaacccggatcggaagttcagcgctcaggatcgttcggtgggtcagagtccggcgtggcgacccggttacggccggcgtttttcgctttgtataccgccagatccgccagtttgagcaagtcggccaggctgtggccggaaccgcccgggcaggtcaccatgccgatgctgacggtgatctgcagcggatggccggccggcatggtgatcgattccgcctcaatgcgttgccgcagccgttcggccaactgcaacccttgctgtggctggccgagcgtcgagacgatagcgaactcttcgccgcccatgcggccgaacagatcatcgacgcgcaaatcggcggcgatcgcacgggtaaaggccatcagcgcctgatcgccgccggcgtggccgaaacgatcattgatcgatttgaagtaatcaatatcaagcatcatgacgcataccaactcgcccttttggtcaatcatccgctcgccgcgctgcataaacgcattgcgcgtcagcacgtgggtcagcgcatcgtggttcgccacatgctccagcgtgcgcagcagcgcgctgcgcgcatagttcatgctggccacggcgatgggccccagcgccagcagcgcgatgcccaaacgcatcgataccgcgttttgcaacacctgcatgtcgagcgtcgtgctaagcaacccgaaatcgatcgccagatggcaccacagcacataaatcagcaccgcaatcatggtgcagaacagcgaaaaggacatcgccagccacagcagcaccggcatgggaaagatcaccgccccggggccgccgatcagcacgctgcagatcgccgccaacgccagcagcgccaataccgccagttttcgtcccgcgcgcggccattggctgcgctgcgtcactatgctgcgggccgcgcgcaagcgatgccgccaatcggcgggaaacgccagaataaacggcatcagcgtgacgtagttggtgaactcggatgagaaccacagtgccagcgaggtcaaatagggcctgccgaacagccactgcgaggccgccgcgcccaccaaaccggtcgcggcggcggcggccaggcagatgccgaacaggtacatgctggaggcgccacgctgcagcatacgcgccggcggcgacagccgcatgtacagcagataccccaccaccacgccggtcagattggcggcgttcagcagcagcgccttttgcagcgaactgccggtcagcaggtccgccgccagataacccagcaccgccatgccccagccggcgcgcgtggcccactgcgggcggcgcaccagaaacgccagcagtacggcgtttaccggccagaatatcgccaaaaatccgacggggcggctcacgatgcccaacaggcaaaccgcgaacaccaacagaaagacggtgagtgcgggccaaattttccgggcatcggacaacgaggtggtttgcatcttggatccagagacttctgctgcgtaaggtgacaatctgttcgtgtcacaaccgtcgacgatgaggagaagataagcggccgactcgcctattattgccagttttgccggcccggacatctgtttattcatctaggaaaaatatatttgtgtatcaatatattgacgacacccgcatacctggcacagaaacggctaaagcggacgcttcactttgaacatttcacgccccagttggcctgttaccggtaaaaaccgccgtctttttcctcaaaagcaaaataagattgggctatgtggggttgttttttcatcccgcgtcaaaacgccttgcgatacatcacaaaaccggggcgctccgccaccttgtcgtacagccgcatggcgatctggttggtttcgtgggtattccaatacacacgcggcaaccccaactgctgcgcacgctcgtaaaccgccgcgatcagcgccctcgccacccctttgccgcgcaccgcctctgcggtgaacagatcctgcagatagcagttgggctgcagctgaatggtgctgcggtgcagaagatagtgcgttaatccaacgacctgcccctgatgctcggcgaccagcgcgtacatcggttcgtaggcgtcgaaaaaacgccgccaggtggtctgtgtcacctcatccggcagcgccgttgccccctcccggccgtaaaaggcgttatacccttgccacagtgccagccaggcggcgtaatcccgttgttccagcgatctgaccacgatgctttcgctcatgatgtcctcttcgatgatgcccaaatgccccgcctccagcatagaacaacgagcgtcaacgcgcaggcggcggcatcacaccggcgagaaaatccagcaacgcgcggttgaacagcgcgggccgctgcagcggcgcgaagtggctgacgcccggcagcgtcgtcaaacgggcgccaggaatgctgcggctcaggtaggcggcatgttcggcgcggataaattcatcgtgttcgctgtgaacgatcgtcaccggcacgcgaatggccgccaattcccgtgcgcggtagtccggctggctgctcatcatcaggcttacggcggagacgaagggagcgaaatcctccggcgtcggtgacaaggcggcatagtcctgcgcatggcgcgcaaaacagcgctcgacgagcggactggacggcggcggtttaaccccgctggcatccatattgcaaccgaagaaaaagacgccgtccacccgctcgggcgcccgatgggcggcgatgagcgcgacgcaagcgccgtcgctccagcccgccagcgcggcgtgggggatttgcagcgccgccatcaccgccaacagatcatcggccatccgatcgtaacgatacggccgggcgtcgcgcgtgctgcgtccgtgcccgcggctatcgatgagcaacaccccgtagccggcggccagcagcgccggcagttgatacccccagttgccgctgtggcccaggccgccgtgcaacaggatcagcgtcggatcagcgccataggccgcataccagatgtgcgcgccgtcgtgttcgacaaagccctgcctggaaccgggcggcaacggcggcgcgccctgcgcggcaaagcgggtcaaatcgtcgtcggtttgcatctttctcccctcattcgccgaggttgagcatcaatacggcatccagggagtatagttcgcagcggcaagcggtgccgttcgctttcccggcatatacttaaaggaggaatcgcaatggaggacggtgagatgaagaagataattctcgtgtttttgacgttgatgctgagcggttgtatcggcggaggcggcggcccatcgaatgcgccttcggcatcgccaaatgaaccttacacctgcaccaaatccagcgccaacagcgactgctcgcaatcggtggaaccatcgatgtactagccgcgctcggcgggccgtcgcttaacggcccgccgcctcaaaccggcactaggaggagtgctcctcttcattggcctgatatcgcgtcgcctgctgcttcataaataccacttcttgcgggctggacaggctcacttcctgcgcgcgcagcagcttgaggatattgaacagcagttcgctcttggtggcgccgaccatgcgcgggctcggcacatagccggtcacgctcaggataatgccgtccggccccagttggctgaagcgcacgtaaggcgccggcgtgtccagaatggtttcgtactcgttataggcgctgagcaagatattgcgcacctgctccggatcgatcgaggtcgggaacgtcaacgcgatggtcaccacgccttgcgcgttgcccatggtggcgttgcgcacgttctgcgagatcagctgcgagttcggtacgatcatggtggaacggtcgctgagctggatttcggtagcgcgcacgttgatgcgccgcacgtcgccttccacgccgccgatgccgatcatatccccgaccttcaccgggcgttcggtcagcaggatcaggccggaaataaagttcttcacaatctcctgcaaaccgaaaccgataccgaccgacagggcgctgacgatccacgccaggttgctccactggatgcccagcgccgccagggtgatcagaatcaccagcacatagccgatattgctgaacagcgtcaccagcgaggcgcgaatgccgacgtccgaaatggtcttcggcagcagctcagagcccagccagcgccgcaccgcgcgcaggatgtagatgccgatcgctaggcagatcacggcgttgagcaggttgccgggcacgatgttgaaacgctgcaagccttcgccggtcaggatcgagacgattttctccatcagcgagcccggcgtggtgctgccgaacgagccgttgaacaacgcgacgatcatcaacagcaacagtgaacatttggccagcgcggtggtgatgatcgccacctgctccagatggcgatccttgaagctgagcgttttcttcagcatcttgccgctgacggtctgcggcgaaaacagcgcggcgcacaggtcggtggcgaacagtaccatgaagtagaacgccatcagcaccagcaccacccagatcagctggtaggtcaggaagcgggcgaaggcgatgtagccgataagcagggaaagcaggatcaccaccgaacacaccagggtgacgatgtgcaccagcccgccgaccagcgtgcgtttttccaggtgcgcgccctgctgctccagacggcgacgaatgcgctggccgcgcagcggcgccgccagcagcaccatgccgatcagccccgccaccaggccgttgccgaagatggtggtagccaatgaggcgctgacgacgttgttgatcagctccacagtaccgaacgccagcgccagaccggccagcagcggcgagaagtaacgcagcccggcggccacttcattgtccagcgaagccaaacgccaggacgggcgattcagcgacagcgccgcacgccccagcccggcgatcagcgcgcagaaaatccccagacggttaaagccttcggcaaagtcttccagcatcaccggcagcggctgcacgcggataaagacgtaatacagcaggttcagcgcgatcgaggtggtgatcaccgtcaccgccacggtgatgatggccataaagctgcggcgcaggcgcccgtccggcaggaagcgaatgctgacccaggcgaggaaacgctcggacaaatagcgcccccaggaccagacgatcaccgccagcgccagcaacgccagcgtgccgtaccgccattcgtcctgccaactggcgtcccaggccgctttcatctcggcgttgaactggtccagccgctgcacgtcatccgctgacggctgcacgaccggcgtccagaatttgacgcccaaaatgctgccggtgttcagcgccagctgggttttgaacgccacccgacgcagatcgctgatctgctggcccagatcgaaggcgctggtcttgatggcctgcgcgcgttttaccgcatcgtccaactgcttcttgctgctgttcagcgcattgcgctgctgggcgacggccggggtttccggcagcgcgccggccgccggggccggccccagcacgtccagctgcgcctgcagtttttcctgcaccggctgcagatcggcggacaatttatccatgctggcgaccagatcgtccgtcgccaaccgcagcttgctgagctgggtgtcggtcgtcgctttggaaaccagctgcttcatgctgtccaactgcttttgcgcggctttcagctgcgtagcgggatcgggcgcgctttcggcggcgggatcatcctgggtggcggcgacggcggcgaacggcgtcagttgcatacccaacagcaataataacaacagcaggaacgggcgaggctttaacataaattcagtgctcagcatcattatctgatagacagacgaacaggcggcggatgaaccgtcgcttaaccataaacgctaattataatagctgcttaatgtcggccgaaatacagtaattattcccattgtgtgccacgcgcccgcgctcgccttagcttgctgataattcaggcgcttttacactggcgatacggcatgaagcgctctataatccagccaccgattaacctgcaaccaataaaaggagacttactatgctgacgtgtgaattggtttttcactcacacttctttggtaatcgtcgccgctcaagcattaccggtatcgcgctgcgataacccagcttgagcgaagcttactaaatccaggatcttccctccggcttaccgggttgtcgtcagcaatgtttgacgataggcattgtcatgcctgtaactcttgagtaagcaatgagcacattactgtctgcacaatctgtcggttacgacaacgcgttcggcgtcctgctgagcgagatttccttcagcctgaaaaaaggcgaccgcatcggtttgatcggcgataacggctgcggcaaaagcaccctgctgcaaattctcagcggctacctgcctgcgcacaccggaacggtgacattgtcacatcaatgtctgatggcgcgcatcgagcagcacctgccgccggaactgcacaccagcaccctgctggatgcggttctggcgcggctgcctgcgggccaacacctcagcgaacgctggcgctgcgaagcgctactggccgagctggggtttgaaccggcgagctggatgctgaccgccggcaccctcagcggcggccagcatacgcggctgctgttggcgcgcgcgctgatccgccagcccgatctgctgctgctcgacgaacccagcaaccacctggatctgcccacgctgctgtggctggaacagttcttgcgtaactggaccggcagcttcgtgctggtgtcgcacgatcgctacctgctcgaccaggtaaccaactgcacctggatcctgcgcgacaaaacgctgcagttcttccgtttgccctgctctgcggcgcgcaccgcgctggcggaacaggacgccgcagacgaacagcggcgacaggccgagcaaaaggaaatcgaccgggtggaaaaaagcgccaagcgcctggcgacctggggcaaggtctacgacaacgaagatctggcgcgcaaggccaagcaaatggagaagcgcgtcgatcggttgaaggaagaacagaccaccctgaccgccggcagcccgtggcggctgcggctgcagggagaagcgctggacgccgatcgcctgctggcgctgccgcactgggcggtgcgcccggcgccggatgcgccggtgctgttcagcctggaacatctgcgcgtgaaaagcggcgatcgcatcgccatcgtcgggcgcaacggctgcggcaaatcgtcgctgctgcgcctgctgtggcgcgagtatcagcaacaaacgcagcgcccggcgctgttccatccacgcgtgcgcatcggctattacgatcagagcctgcaacagctacgcgatgaagacacgttgagcgaagcgctggcgcagtttgcgccgctgactgaggaacagcggaaaatggcgctgatcggcgccgggttcccttacctgcgccaccatcagcagatccgttcgctgagcggcggcgagcgttcacggttgttgttcgtcggcctgacgctggccaaccattcgctgctgttactggatgagcccaccaaccatctggatatggcgggtaaagaggagctggcggaaacgctgcgccaattccccggcgccgtcatgctggtcacccacgatcggatgctgatcgaacagagctgcaaccgcttttggctgatagaccagcaaaaactggaggagtggcacgatctcgcgccggtgtaccagcgcctggcgggtgaaacgccggctctgccgacggcgcacgaggccaacgcagacgccccgacgccaaacccgctgttggaaggcgaagaggcgttgctgaccgccctgtttgccctcgaaagcaaactggaggccgacctggcgcgtaaaccgaagcatcaaaaaccggagcttcaggcgcgttggcgccgcgagattgccgacctcaccgcccggttgcatctgggctaatcccacaggccgcccggcggcctgtcaggctattgacaaagaggggaaaaagcgtggtttttcccctctttgtggtgatcggccgaaaatcaataaattgattttccttgttttttattcggtgatctctgccaacccggcaagggtataaggtttgtcatcaatctcacaggccgcccggcggcctgttttttcctctttgtaaaaaccgcgtgccgccgacggtttgagacgcgacacgctgcgcttttcttatccgcagcgctgagcgacacattactttcatcattctctggcaggctactgccattcttttttttcgttatcaggcactccatgacgtcactctcaccacgggacatcgaggcgcgctaccgcttcgcgcgtgagatcgcccgcgccgccgccgatctcgccttcagcttttatcaacgccggcaaagtctggccgtcgagtttaaacaggggctgcaggacgtggtcagcgaggccgaccgccgagtcgaggcgctgatccgccgtatgatcaaccgtcggtttccccaggacgggtttctcggcgaagagagcggcagcagcggcgataatgttgcctgtatttgggtggtcgatccgattgacggcaccgcctgcttcctgaacgggctgcatacctggtgtatcgcgataggcgttgtgatcgacggtgagccagcgatcggcgtggtctacgatcccaaccaccgcgagatgtttcgcgcctgccgcggccaaggcgctttcctcaacggggaaccgatcggcgtgcatgccgggcacagcgtcgcggatggcgtgatgggcgtcgggatatcgccgcgcgcctcggcggcggaattcagcggttttctctgtcgcctgctgcaggcgggcggcatgtttgtgcgcagcggatccggcgcgttgatgaccgcacaggtggccgccggccggctgctgggctattacgaaccgcatatgaacgcctgggacagcctgcctgggctggtgctgacgcgcgaagccggcggcgtggcgaatgactttatgcaccacaacgggctgcgacgcggcaacccgctgctactggccaacgcggcgctctatccgcaattggccgagctgattcaaacgccgggcttgatcggctcgacgtgccctatcgcgcgtgagatggccggataaagcgcgcgcagccgccgctcgacccgatcgaccgcatcgtgcgcggcggcgatggttaccgccggcgacacccggcagtggaagttgacgatgatgccgccgtcggttctgcgcgcccggatgttgtgcacgtcttgcaccttatccccctgctccagcgccgactgcaaaatcagccgaatatcggccagctcggcggcggaaacatcctcgctggccagccagtgcggcgtctgcggctccagatgggtccctatctcggtgtcctcgccgatcgcctgacgcaggatcccttctatctccgtggcgatatcatgcgcctgcgccacgctggcgttggccggcaccgccaaatccatgccgatcgccatgtgcgtcggcaactgctgcaaggtgacattctgcacctgcgcgccgtgattggcggcgatcgcccgaatgcgcgtcgccatgtcttcgtcgctgcgggtctgcggcaccgcgatgacggtaaactccgccttggcatactgctgccgcagtcgttcgacgatttctcgcttgagcgcatcgatgcgctccagcggcaaggtgcggcacaccgccaccgtgatctcgacaaacagtacggcgccggcgttgcgaatacgcacgctgtcgcaggccagcaccgccgggaagctgtccagcgtggcgcgaatcgcctcggtggctccggccggcgcggcatccatcagcgaatcgaaggaacgtttacccagtttgattgccgcgacaaagataaaaccggcgacgatcagcgcggcgatggcgtccgcacggccaaagcccagcagcacaaacaccatgcccagcagcaccacgccggacgaaagcatgtcggagaagaaatgcagcgcatccgcttccagcgccgcgctgtcggtcgccctggcgacgcggttgagcgcccgcacgcggaaaaaatcgacgcagatggaaatcagcagcaccgcgatcaccaccggcgccgcgacgatctcatgcggctgcccaagcaggctgctgcccgcctcgtagacgatccaaccggcggcaccgagcaacagcaacacctcgaacagtgccgccaggttttccaccttgccgtggccgaagtggtgatcgtcatcggcgggtttatcgctgatgcgcaccgccagccaggtgatgctggtggcgataaaatcggtgaaagagtggatcccttcggatatcaggccaatactgccggtaaaaatgccggcgacgaatttgcccgtggccagcaacccgctggcgatcatcgagtttctggccacggcctgtttttcattttgcatgatgctgctcacattcggacggtgatttatttttttactttagaggataattgccagacaaaggcgatcagcagcatactgccagagaaagtcagcatgaggctagtaagaaaattggattttccggtggaataaaaataaatctcattcacccccaccgaaatcattaaaatggcgtagagcaatcccagaataagaatcgtcattattatcaactcccgttttaggctgcgcgttcagcgcgccgctaaatcctccccataataaatagcgatcacggggaggatgcatctaggcggatctttagcgttcatcaatcatcccatttggtgctcatataggccgccaacaggcccagagagctgatcattgccaggaatcccataaaaatagtcatgtttcccattattttgtcctcaggttaaatgttatcgataaaatccccttgcgttaaatatcggggttggtcggcatccatggtttttaacgtcctcctcaggcttgtcacatttccgccctttacgggcggagcggtttaaatacccaaaacgtgctgggcgattttgaaataaataatcaggccggtgccatcgataaaggtggcgataaacggcgccgacaccacggcaggatcgatgccgagacgtttcagcagcatcgggatgatcgaagaaacaatggcgctccacacggtgatcgccaccagcgacaggctgaccaccagcgtcacctccatgccgacgcccatgatccaggcgcgcacccaggccgccagaccaatggtgacggcgatcagcagcgaggtcgtgacctccttgcggatcaccgcgcccaggttgcgcaggctgacctctcccagcgccatggcgcgcaccagcgtcgaggtgatctgggtgccgctgttgccgccggtgccgatcagcaacgggatgaagaacgccagcgcaatcgccgcttcgagctgatcttcaaacgctttcagcacgttgccggtgtaggcttcagcgacgaacaacatcagcagccacaccgagcgtttgcgccacagcgcccacgggctggtctccagataaggcttgtccagcggcaggctcgcgccctggcgttgtgcatcctcggtgttttcatcctcgaccagccgggcgatctcacgctcgcccagtacgccgaccagcgtgttattggccaccaccggcaccacgtccaaaccgcctttgcccagcagatgcgccacgtcgttacggtcatcgtcgggtgaaacctggaaatagctgtaatccatcattacaccgacggctttatcctgttcttcgcactgcaacagttttttcaccgacagtgtgccgcgcagatgataatcgtccgcggtaataaatacccggctgggaatttcgtccgttttgagctgcgaaagtaaatattcccgggcatgattgaccgtcatcgttgcgggaacggtaataaaatcggcgttcatataaccggcgaccgaagtctcgtcgagagtttcagtcgcgttcagcgccggagaagaatagtgttgatgtgacttgatcattttgtcagtccctatttctgttgtgaacttcaacagcgaatcgcataggggcgtaaccacagagggagtgcagactgcctatctccgcgtccaggttttagcactatacaacgtatccgagttgttgctcggaagttactttgggctgaaccttaatccgataaagcctgtcttaaccttgggcatctctcgatgtcgtcagatcagtaacctgtgtttgtataggagcctcgccaaacgagatactgcatataaactaccggcgcagtataggcgttgttttatccggcgggaagaaaagattgcccgtcgtttatggagtatttaggataatgttaattaaacggccatttataaaaacggctgatataaatcagccgttttttatttttcagtgttcgagaatgtagacgtttttatcgtataaggcgccctgacgagtaaagtcgatccccttcacgtaaggtttgatgagcgtggcgttggcttcgtagtacaccggcgcgaccggcgtatcgacggccagcaccgcctcggcctgctggaaatactgctgcacctgctgcggtgtcggcgccgccgtcgcctgatgcagaatgcgatcgtactccggattgcggtatttggggctgttctcgctgctgtcggaacggaacacgttcaggaaagtagacggatcgttgtaatccgccagccagcgggtaaaggccacgccgtactgcccgcggttgatattgtccagcgtgactttgcgctcctggctttgcaaggtggcctctgcgccgaggttctttttccacatggcggcggcggcgatgacgatcttcttaatggtggcgtcattgctgtacagcacggtaaagcgcagcggatgctcggcgttgaaaccggcctgcgccagcagttgcttcgcctgggcgtggcgttgttccggcgtcaaaccggccgcggcgccgggctgcaggctatagccgcccgccccggttggggtaaaggtccaggccggctgctggccgtatcccaacactttgccggcgataatctctttgtccagcgccaggttcagcgcctggcgcacccgcacgtcgttaaacggcgcctggcggttgttgaaggcgaaatagctggtggagagcagcggataggtcaccagctgttgctcgccgagcgtttttttcagctgctgatacagctccggcggcgtggtataccccagctcaacctcaccggcgcgaaaacgcgccacttcagggaagccctggatcggcaagaaggtgaccttgttgagcacggtattggcgttatcccaatactgcgggttacgttccaccaccaccttttcgttcaccacccactggctgaggcggaacgccccgttgccgacaaagtgcgccggctgcgtccagtttttgccgtactgctccaccaccttgcggttaaccggcaaaaccgggaaatgcaccagttgcttgagcagataggaattaggctccgacagcgtcacctgcagagtgtgcgcatccagcgccttgacgcccagctcgctcggcgatttgctgccggcgttgatcgccgccgcattcagcacgtaggccgaagccagatagctgccgtacggcgaggcggttttcggatcggtgaggcgccgccagctgtatacaaaatcgtcggcggtcaccggatcgccgttcgaccatttggcctgcggccgcagatggaaagtccagacgttgccctgatgctcccacgtctgcgccagtgccgggatcacttcaccgtcttttccgacgcgcagcaagccttcgaacagatcgttgaagatgtagaactccacattgctttcggccaggtttggatccagcgtcgccggttcatacccgttggcgcgcaccagttcttgcaccgccgccagtttaacgcctgccggcacctcagcggcttgggcagccgtagcgttaaaagccaggaggattaaaccagccagtttcttgccattaaatgaatatttcacgtcgatatccctgattagtgttttatcgcgtttaatatgcaatgaggtagtggaataaattaaatcattaatcgctatgagtcataaccaaaagcggtgttgaatttctttcattatcaaagaagtactggcgacagaacgatgaaaaacacgaggataaacgcggagaccggcattgccgtcaggaacgccgtgaaccggcggtgacataaattcaggcaatcaatacagattattccagccgaagcttaacttatccttagggcaattcattttgtgagcgatcgtcaaaaataatttaatacgaatcgttttcactatcattattgatgttcttggctaaaatcggcctgcttgcgctcgccaggcgatattcgttttcttcattcgaacgctaaaaaggataactgcatgaagctgcgtatttcatctctcggccccgtcgccctgctcgcctcctcgatgatgctggcctttggcgctcaggcggcctccgccgaccagggcatcgttatttataacgcccagcatgaaaatctggtgaaatcctgggtcgacggatttaccaaagacaccggcatcaaggtgacgctgcgcaacggcggcgacagcgaactgggcaaccaactggtacaggaaggcagcgcttcacctgccgacgtgtttctgacggaaaactccccggcgatggtgttggtggataacgccaagctgttcgccccgctggacgccgccacgctggcccaggtggaaccacaatatcgcccaagccacggccgctggatcggcatcgccgcccgctctaccgtgtttgtttataacccggccaaactgagcgacgcgcagctgccgaagtcactgctggatctggccaagccggaatggaaaggccgctgggccgcttcgccgtcgggcgccgatttccaggcgatcgtcagcgcgctgctggagctgaaaggcgagaaagccacgctggactggctgaaagcgatgaaaaccaactttaccgcctataaaggcaacagcacggtgatgaaagcggtcaatgccggccagatcgacagcggcgtgatctatcactactacccgttcgtggacggcgcgaaaaccggcgagaacagcaacaacatcaagctgtattacttcaaacatcaggatccgggcgccttcgtcagcatctccggcggcggcgtgctggcttccagcaagcatcagcagcaggcgcaggcgttcatcaagtggatcaccggcaaacagggccaggagatcctgcgcaccaacaacgccttcgaatacgccgtcggcgtcggtgcggcttccaacccgaaactggtgccgctgaaagatctggacgcgccgaaggtagacgccgcgcagttgaacagtaagaaagttgtcgaactgatgaccgaggcgggcctgctgtaaggcccgccggcaaaccgagagtttttgatcgttatgtcaaacctgagtacccacgccgcgcagaccgcgcggcgttattctgttgtcccccgtcacccgcggccaggggcgatcgtggtggtcagcgccgtgttgctgtcgttgctggcgctgctgccgttgggattcgttatcggcgtggcggttgaaaccggctggcaaacggtcaaagcactggttttccgcccgcgcgtggcggagctgctgttgaataccctgctgttggtggtgctgacgctgccgatctgcgccgtgctgggcgtggccctggcctggttgaccgaacgcaccacgctgccgggccgccgtctctgggcggtattggcgaccgcgccgctggcggtgccggccttcgtgcaaagctatgcctggatcagcctggtgccgtcgatgcacggcctgggcgctggcgttttcatctcggtgctcgcttactttccgtttatctacctgcctgccgccgccgtgctgcgccgcctggatcccggtatcgaggacgtcgccacctcactcggctcccggccgccggcggtgtttttccgcgtggtgctgccgcagctgaaactggcggtctggggcggctcgctgctgatcgcgttgcacttgctggcggagtatggcctgtacgccatgatccgtttcgataccttcaccaccgccatcttcgatcagttccaatcgaccttcaacggcccggcggccaacatgctggccggcgtgttggtgctgtgctgcctggggctgctgttgcttgaggcgataagccgtggccgcgcacgctatgcccgcgtcggttccggcagcgcccgcagccaaacgccgcgccgcctttcgccgccgctcgccgcgctggcgctgctgctgccgatcgcgctgactgcgctggcgttgggcgtgcctttcattaccctggcccgctggctgtggctgggcggcctcgacgtatggcgcaacgccgatctgtggcccgcgctgtggcaaacgctgtcgctgtccgccgccggcgcgctgctgatcaccctgtgcgccattccgatggcctggctgtcggtacgctatccggcccggctgtatcgggtgctggaaggctgcaactacgtgaccagctcgctgcccggcatcgtggtggcgctggcgctggtgaccatcaccattcacagcttccggccgatttaccagaccgaaatcaccctgctgctggcgtatctgctgatgtttatgccgcgggcgctgatcaatctgcgcgccggtatcgcacaggcgccggtggaattggaaaacgtggcgcgcagcctgggcaaatcgccggcgcaggcgttgtggagcaccacgctgcggctggcggcgccgggcgccgctgcgggcgcggcgctggtattcctggcgatcgccaatgaactgaccgccacgctgctgctggcgccgaacggcacccgcacgctggccaccggcttctgggcgctgaccagcgagatagactacgtcgccgcagcgccttatgcgctgattatggtggcgctgtcattgccgctcacctggcttctttattctcaatctaaacgcacggcgggactatgagcacgctcgaactgcacggtatcggaaaatcttacaacgccatcagagtgctggaacacattgacctgcaggttaccgccggcagccgcacggcgatcgtcggcccttccggctccggcaaaaccactctgctgcgcatcatcgccggctttgaaatccccgacggcggccagatcctgctgcaggggcaagccatgggcaacggcggcggatgggtgcctgcgcatctgcgcggcatcggcttcgttccgcaggatggcgcgctgttcccgcactttaccgtcgccggcaacatcggttttggcctcaagggcagcaaacgcgagaaacagcatcgcatcgaggcgttaatggagatggtggcgctggatcgccgtctggcggccctgtggccgcatgaactgtccggcgggcagcagcagcgggtcgcgctggcgcgtgctctgtcgcagcaaccccggctgatgctgctggacgagccgttctcggcgctggataccggcctgcgcgccgccacccgaaaagcggtggccgaactgctgacggaggccaaagtagcgtcgatcctggtcacccacgatcagagcgaggcgctgtcgttcgccgatcaggtggcggtgatgcgcaatggccggctggcgcaggtgggcgcgccgcaggatctttatctgcgcccggtcgatgaaccgaccgccagcttccttggcgaaacgctggtgttggccgccgaactggcgcacggctgggccgactgcgcactggggcgcatcgccgtcgacgatcgccaacgcagcggcccggcgcgcatcatgctgcgcccggagcagattcaaatcggcttgtccgatccggcgcagcgcggccaggcggtgatcaccggcatcgatttcgccggcttcgtctctacgctcaacctgcggatggtcgccggcggcgcgcaaatcgagatcaaaaccgtcagccgcgaaggcctgcagcccggtgctcaggtcactctcaacgtgatgggccaggcgcatattttcgccggctgactcacttaaggccgggctgctccccggccttctcagcggcaaatcttgtcgcggcgcggctttttcggcgccagcagataatccaccacgctttcgtcaacgcagctgtcgatgccgttcagcgccagcgtatgcccgtcgcgttcgcgggtgatcagcgggcttttaaaggcggcggccatcacttgcgcgttgcggtacggggtggtcggatcgtagcgctgggcgacgaacagcagcggcggcagcgcggcggacgcagctggggtatgtggccgatctttgccgcggtacggccacagatcgcacatttccagcgggtattcgtgcagcggcagatagtgggcatacaaagcggcggtattgatctcctgccgctgccggcgcaactgctgcggatcggccgtcgggttggcgacgtcggcgcaggtgatgacgttcagggcgtcatcggcatccggcgaatagctttcgtcgatcagatcggaaacctgctgcccggcgatgccggcatcgagctggcgcagcacggtggccagctcatgccagcgctccggccacagcagcagcgaacgcgtgaccgtcaacacgtcgtcggcggagatttcatagcctgccgcagtgacgaacggctgctcgtgcagcttgcgcagcaaggcgtgatagcgctgcagcgcctgattggcgccgccgcccagctgacagctgtcggttttaccgcagtaggcggcgaagcgcaggaagctttgctggaaaccccgttcctggttcagccgctgggtgaaatcgtcctcggccagatccaccaccccgtcgagcaccagcgcgcgcgttttcttcggaaaacgctcggcatacagcgccgccaccttggtgccgtaagagtacgccaccgccgtcagccctggctcgcccagcgcgtggcggatcgcattcagatcgttgaccgcttcgtcggtgccgatatgttgcagcacgtccgcgccggtctgtttgatgcaggcggcaatcagggcgcgcgtctggttctccgcgccggccacgtcgttgtcgtccggttcagggcgttcgtcaccttcggccagctggcaggagattttcggcgtcgattggccgacgccgcgcggatcgtaaccgatgatgtcgtaggatttacgcagcctggcgacgtgggcgtcgttgcctaaataggggttgatgcccggcaggcccggcccgccgctgattgtcaccacgctgccctttttcggcccggtggcgggcagcagggtcagcgccaggcgcacggtctgttcgcccgcctgcgccgcatgagcgggcggcgtggcgtacgccagcggcacctcgagatagccgcagcgcagtcccggcggcggcgcctcatcgaaccagcgctgaaagccgctgttgagacaagattgccaacgaatgccgtttccggccgccgccccgtggagcgcaggcttagcctgagcgggcaacgcggcggcagtcgcggcgagcagcgccagaatacgcagtactgacatggggagtcctttcaactcaacgaatcggtcaaaggttaacggtacccggttaaaccgctagccaatagaacacaaaaagccgcgcgggtgaagccgccaccgcacgcccggcaagacttttctctgctcggattgctcttataacgcacagaatgctgcaaaaaacgtcgtttgcctgctaggcttagggttcattatcccacaaggaacaggagagcagcatgtttggaaaagcggaagacaaagccaatgaagccgcaggcgcggtagaagaagcgttcggcaaagccgttgattcgccggagcatcaggtgcgcggcgcggcgcgcaaatacgcctcccaggccagctatgccgcccgagacgccgcggacagcgtaagaacgcaggtggaagccaacccgctggccggcgtggccgttgcggcggcggtcggcatcgttttcggcttcctgctgggacgcaaataagcggcgaacgcgccgctcgacaacaggcccgttacgggcctttttttcgcctgcgtgcaaactttcatctatcacagccatcgcttaaaaaaaccaacgccttcaactacgattagtttgtgaccagagcgaggctctgcgatccgacggataaccctatgaggattatcaccattatccatgctgtttaagccgctctccttcacgcggctaagaaaggttgattatggctcgcaccacccctatcgaacgttaccgcaatatcggcatctccgcgcatatcgatgccggcaagaccaccaccaccgagcggattctgttttacaccggggtcagccacaagctgggtgaagtgcatgacggcgcggcgaccatggactggatggcgcaggaacaggagcgcggcatcaccatcacctcggcggccaccacctgcttctggaacggcatgcagcataactatccgcagcaccgcatcaatatcatcgatacccccgggcacgtcgatttcaccattgaagtggaacgctcgatgcgcgtgctggacggcgccgtgatggtctatgactcggtgggcggcgtgcagccgcagtcggaaaccgtctggcgccaggccaacaagtacaaggtgccgcggctggcgttcgtcaacaagatggaccgcatcggcgcggattttttccgcgtgcgcaaaatgatgatcgagcgcctgaaagccaacccggtgccgatcgttatccctatcggcgccgaagatcacttcagcggcgtggtggatctggtgcggatgaaggccattctgtgggacgaggcctcgcagggcatgaacttcagcttcgaagagatcccggcagagctgcgcgattcggcgcaggagtggcgtgaaaacatgattgaggccgccgccgaagcctcggaagaactgatggagaaatacctcaaccaggtgcccctgagcgaagaggagatcgtccacgggctgcgggtgcgcaccgtcgccggtgaaatccagccgatgctgtgcggctcggcgttccgcaacaaaggggtgcagcgcatgctggacgcggtgatcgagctgatgccctcgccgctcgatgtgccgccgatggaaggccacggcgaacacgatgaaatcatcacccgcaaagccgatgacaacgaaaagttctcggcgctggcgttcaagctgatgaccgatccgttcgtcggccagctgaccttcgtgcgcgtctactccggggtactggccaaaggcagcagcgtttacaacccgatcaaaggcaaaaaggagcgcatcggccggatcgtgcaaatgcatgccaacgatcgtaaggacatcgacgagctgcacgccggcgacatcgccgcctgcgttggcctgaaggacgtcaccaccggcgatacgctgtgcgatcccggcgccatcatcacgctggagcgcatgaccttccccgagccggtgatcgcccaggcgatcgagccgaaaaccaagggcgaccaggagaaaatgggcatcgcgctgcagcgcctctcttcggaagatccgtcgttccgggtgcgcaccgatgaagaatccggccagaccattatctacggcatgggcgagctgcacctggagattatcgtcgatcgcatgcgccgcgaattcggggtggagaccaccaccggcaagccgcaggtgtcgtaccgcgaaaccatccgcaaacgggtggccgacgtggaaggcaagttcgtgcgccagtccggcggtaaagggcaatatggccacgtggtgctgaccgtcgagccgaacgaacccggcaaaggcttcgagttcttcgatgaaatcaagggcggcgtcattcccggcgagtttatcccggcggtgaaaaaaggcgtgctcgaggcgctgaacaacggcgtgctggccggttatcaggtagtggacgtcaaggtgcacctgaccttcggttcttaccatgacgtcgactcgtcggaacaggcgttccgcatggcggcgatcttcggcttcaaggaagcctgtcgtctggcggatccggtgatcctggagcccatcatgtcggtggaggtagaaacgccggaggattacgccggcaacgtgatgggcgatctctcctcacgccgcggtctggtgcagggcatggaagagatcccgggtggcggcggcaaggaaatacgcgccaaggtgccgctgtccgagatgttcggctactcgaccaccctgcgttcgatgtcgcaaggccgcgccacctacaccatggaattcagccactacgccgaagcgccgcgcaacgtggccgaagagatcattcaccacagcaagcgttaacccccgcgcccgccgctgcggcgggcgtcacctcggcttgtcctccaacgccaccaccaccggctgcggcttgatgcgcatggcgtacaccacgccggccatcaggcagacgatgccggccagcgtcagcaacggcggccaggcctggcgcagcagaaaggtatacgccaaccccgccagaatttcgaacacgatgagcggccccaccaacaccgtcggcagccgctggctggcttcgttccagcacagcgcccccagccaggaacagaacacgccgatgatcagcatcagcggaataaacacctcagggcgcgggccgaacggcaaggtgaacgccggctcgctcagcgccagctggccgcagaccgccagatagcccagcagcgccagcggcagcgtcaccagcccttgggccgtggcccaggtggccggacgctgcgtcggattctcccgcagccagcgtgaattgcgcagcgggaaccaggtccagcacgccaccgccaacacggccagcccaagaccgctgagatagcgccagccgtcgatcgataccgcattgccgcgtagctcggcgacgttcacgcacgccaatccacagacgatcagcagcagcgccggcgccagcttgccccaggccaggcgcccgtcgtgccggccgtaaaacaggttggcgcagatggcgatcaccaccggcaaggtgccgatgatcatggtcgacaccggcgcgtcggtgcgctgaatggcgctggccaaacacaggtagtacagcagattgccgatggccgtcagcttgagcgcctccagccaatcctggcgccgcagcttgcgcaggcggcggcgatcgaaccacgccagcggcaaggtgatcagcccaaaggccagatagcgcccggtggactgcagcgcggcgggatagtccggcaccagcagcgggccgacgaaaatcagtccccacatcagcccggcggccagggcaaacacaacgccaatgaacataacgactccgacaaacggccggcgcggccaacccgcccgacaagacagcggcagagtagcgaaaacgcggggaggaattattgtagcaggttgctgttttagcccaatttcacctgtttctggaaacgcaccggcgtgacgccgtaacgattagcgaacgcgcgcgtcaggtgcgcctgatcggtcagccccgccgccgccgccacctgtgcggcgggtatgccgcgctccagcatgcgtttagcctgcgacagccggatcgccatcagcatctgctgcggcgagacgtgatattcggccttgaacttgcgctggaaatggtacgggctgagcgagaccagatcggccagttggtggagggttacggcctcggcataattatcgtgcaggtaacttttcaccacctcgaaacggtgcgccgcctcggctttctctcgctgcccggtgcggatatgcgggtgcagcaactcgacggcctccagcagcaggccgtcgagcgtaagcggatcctcggtttgccacagcatggcgagaatggcggacaggcgctgcgccgcccgcggatcgtggcgcaccgcatcagtaaaccactggctccgatcgccggacagctgctccagcgcctcgggcgccagatagagcatgcggtaacaccaaccgcccggcgtttcggcttcgccggtgtgcagctcgtccgggttcatcagtaccagcgcgcccggcgccgccaaatgctgcgccccgcgatagcgaaaacgctccgccccggtatccacggtgccgatggcgaaggcgtcatgggtatgcggctcgaaggcatagcgctcaatgtgcgcctgatagagttcgacgccgggcagatgcgacaaatgccggaactgcgcgcaatccttctcgaacggaaactgttgtggaaccccttgcacccgacctcctcatccgtgctgacaatctgctcagcatagccaaaacatcgccgattgagtagccgccctggtcctttcgtgcccatcgcctggacgatcgccgccattcggcgtagggttaaggtccctgtccctttcagacgggccgcatcgcgaagctcatcggcccctgacactccgcaaacaagaggcaacaatgtatccggatactcaactgtatatcgatggacaatggcgcaacgcgctggccgggaaaaccctgcctgtcaccaaccccgccagcgacgaggtcatcggtcaggtggcgcacgccgccacagaggatctcgatctggcgctggccgccaccgagcgcggatttaacctctggcgcaacaccgccgcacaccagcgcgccaacctgatgcgcaaagccgctgcgctgctgcgcgaacgcgccgacgccatcgccgccatcatgacgcaggaacagggcaaaccggtggcgcaggccaagattgaaattctcaacgccgccgacgttatcgactggttcgccggcgaagccacccgcacctacgggcagatcattccgtcccgcgcccgcgacgtgcagcagcaaaccctgaaactgccggtcggcccggtggccgccttcacgccgtggaacttcccgattaaccagatcgtgcgcaagctgtccgccgcgctggcggcaggttgttccatcatcgtcaaaggtccggaagaaaccccggcctcaccggcagagctgatcaaagccttcgccgacgccggtatcccagccggggtgatcgcactggtgtacggcaccccggcggaaatctcggaatacctgatcccgcatccgaccattcgcaagatctccttcaccggctccacccgcgtgggcaaacatctggcggcgctggccggccagcatatgaaaaaggccaccatggagctgggcggccacgcgccggtgctgatctttgacgacgccgatctcgacgtggcggccaaagagctggcgcagtcgaagttccgcaacgccggccaggtctgtatcgccccgacccgcttcctgatccagcaaggcgtttacgaggccttcgtggagaaattcaccgccgcggtgcgtgaactcaagctcggcaacgggctggaagacggcgtgacgatgggcccgatggtgctgggccgcagcgtcgacaatatcgaagcgctggtgcaggacgccatcgcccacggggcgaaggcctgcaccggcggcaaacgcgtggcgggcaaaggcaacttcttcgagccgacggtgctgcgcgacgtgccgctgagcgcgcgcgccatgtcggaagagccgtttggcccggtcgccctgctgcgcacgttcgccacctacgacgaggcgatcgccgaagccaaccgcctgccgtacgggctggccgcctacgcctacagccgcaacctcgccaccgtcaatgcgctggggcgcgacgtggagagcggcatgctgagcatcaaccacatcggttttggcctgccggaaacgccatttggcggcgtgaaagactccggtcacggcaccgaaggcggcagcgaagcgatcgaatcctacctggaaacccgcttcgtcaccgtcgccggccgttaatcacgtgtctgatgaatagccaaacgccccgcaatgcggggcttttttttactcgccggccagctcgaacagccgtcgcgccgccggggtcagccccagcatgtgaatacaggcatgcaccacgcccggcaaccgttcgcagcgtaccgccacgcccgcctcgcgcagccgctgcgcatactcctcggcctcatcgcgcagcggatcatattcgcagctcagaatggtggccggcggtaacccgcgcagcgtggcggcgtgcagcggttcgccgtagggttcgcgccgctgagccagatactgctgccaacaaaataccatcgcgtcgcgcgtcagaaagtgcccctcggcaaactcgcgatagctcctcgtcgccatttcgcggctgagcgccgggtacagcagcagctggcgctcgatatgcgggccgccgcgatcccgcgccagcagcgcgaccgccgccgccagattgcccccggcgctgtcgccccccaccgccagacggtcagcgtcaatccctaactgcggcgcctgttgcgcagcccaacagagcgcctgatagacatcttccagcggctgcggaaacggatactctggtgccagacgatagtcgaccgacaggatcacccggccggtggcgttagccagcgcctggcagggctggtcatacagcgccagcgaaccgaggcaccagccgcctccgtgggcgaacagcatcgccggttgtgcggcagcgcgcctttcccccgccggtagatagacgcgcagcgcaatccggtgcccatcggtggcgaccaccgtatagtccctgacgccgccgctcggtgccgcttcgccctgcagcaagcgcaaaccggtttccgtggccgcgcgcatttccgccagcgacgcgggtggcggcacatcggccgatgccgtcaaaaaggcggcgatgcgttcatcaagcggcatgctgttctcccgcaaggaacggcgtaatcagtgcgataaacgcctcatgacactcctcggtgatgaaatggccgcagccggcgaccgtttcgccccgcagatcgcgcgcattgccctgcagcgtcgtcagcggcgcgtcgccggtggcgtgttccgcccccacggtcagcaccggcatcgtcaatggcgtggcggcgcgcactcggttctggcgaacggtctccgggatcgcccggtaatagtcgaatccggcgcgcaagccgcccggcgccgaataggcggtgatatagacctcagccgccacccggtcgcgccgataggaccagcggttgaagatatagccaagatactcccgctcgcgcccctgggtcagggtctccggcaaatccgccaactggttgaacatgaaatgccacaggaagatgttctcctccggcgcgacgaaaatcggcggcggcggcgccagaccggggatcaccgcctccgtcagcaccaggcgctccaccgcctgcgggaaatcgctcgccatggcgtaaccgacccacatgccgatgtcgtggccgaccagttggtaacgttcgtggcccagttgcgccatcatcgcgtgcaacgccgcaccgatgctgccggtgtcgtaaccgccgacgggcttgtcagagtcgccgatgcccggcggatcgacggcgatcgcctgaaaaccggccgccgccagggcgcgcatcacatggcgccaggtgtaccaggtttgcggccagccggggatcagcaacaccggccgcccttcaccggctatcacgcagtggatacgttggccattgacctgggtatagacgtgttccgccccgagatcctgcaacaggatctcgttctcttgttgtttcatggggtgactccctgtgatggactggctcagcgaatgccgagcaaggcattgatctgctgtgggttaaccggtgcgccggcgaaatcgtcgaacactttatcggtgacacggatgatgcgatcgcgaatgaaggccgcgccctcgcgcgcgccgtcctgcggatttttcaggcagcattcccactccagcgtcgcccagcccgaatagccgtactgcgtcaaacgggaaaaaatgccgttgaaatcgacctgaccgtcgcccagcgagcggaagcggccggcgcgatcgatccatgactgataaccgccgtaaatgccctgccgcccggtcggattgaactcggcgtccttaacgtggaacatgccgataacctctttatagatatcgataaactccagatagttgagctgctgcagcaccatatggctcggatcgaacagcacccggcaacgcggatgatggccaacgcgctcaaggaacatctcgtaggtcacgccgtcatgcagatcttcactcgggtgaatttcgtagcacaggttgatgccctgctcgtcgcaggcgttgagcaccggcagccagcgtttggccagctcgttgaacgcagtgtcgatcaatccttccggccgctgcgggaacgggaacagatagggccaggccagtgaaccggaaaaggtgcccagctcgctgagcccgagccgcgccgaggcttttaccgccagcagcatttgctgccgcgcccactcgccgcgcgctttggcatcgccgtgcagcgccggcggcgcgaagctgtcgcacagcgcatcgtaagccgggtgcaccgccatcagttggccgaaaatatggctggtcagttcgctgaccaccaacccatgctccgccaacataccggtcagatcgtcgcagtaggtttggctttgcgcagcggtggccacgtcgaataaacgccgatcccaggccgggatctgcaacgcgctaaaaccggtctgcgccgcccactcggcaatggcgggcaggctgttgaacggcgctgtctcatcgctgaactgcgcgagatgcaggcttggacctttgagggttttcatcgtaaactcctattggttgtcgattgacaaacaatagaagcaaagcgcggcgaccgcaagcgaaatttataaaggcattggtattcccgccgatttaagcgatcctatgtcgctgaatggcaggtaaattggagcagcgaatggcaggcagaccgcgcgagttcgatcgcgaacaggcgcttttaaaggcgcgaaacttattctggcggcagggttacgaaggcacctcgatgtcggatctggtggcggaattgggtattgcttccgcgcgcatctacaaagcgttcggctccaaagagcagctgttccgcaaggcgatcgccagttacgaaaccaaggaaggcggctttgccgatcgcgccttcgcgcaggaaagcggcattcgcccggcgatcaaacgcctgctggaagatgccgtgcggctctatagccggccggatctgccgcagggctgcatggtggtctcctccgccgccagcgtcagcgcagaaaacgacgggctcaaagtctggctggcagagcaccggctgcagcgcacgcagcagatcgtcgaacggctgcgccaggcggtgcaaaccggcgaactgccggccgacaccgacgccgacagcctgggagactatttcgccgtattccttcacggcctgtcgattcaggcgcgtgacggcgtcaccgaggcgcggttattggcggcggtaaacgtggcgctgacggttttgaacagcagcacttaatcgaccgtcaggtgccctctttaatgcggctcggatcacggcgcgatttttatgtggaaacatatggcggcggaggaactgcgtttccgataaaatccgcgatgtgaggattggtattttccggtttgtggatcagggcaacctgatacgggatcggcctccacttcctccgtcagcatgttgataggaggcaaacccaacgggccagtttaatacatgaaccagttaccattaacttcaacggcaatctccaagacacttcccggctggaaatcagagattttcatccggtttgcgtctgtcggattctgagaatcgtgaatgaagagcgcgccattacggtaagtggccgacttgatttctttaggtatcgaaaccgtaccgccgccgcccccggttacagggtaggtcttggtacccattacgtttgcgctaataacactcaagatcggctgatcggagccgtagttttgaccttccagatacttaggcatccacatccagttgagatctcccgtcaacgacgctgcgttagcggggattgttactttcaggaataccttatttcgcccagcagtatggataatggaacatggcgttgcgatttggccttcggttgtattaccgttgcgcatttgcaaggtagtaaccagaacccgatagcggaaggtatgggtctgatccatatcctcaccgtggacccacgccagtggctgcgtttccaaccggtcgacccacatacgctcgacgatctggcctttcttcgcgttaccgtcgtaaacgatggtgtaacgaatacagttatcgttttccttaggctgctgcttgtagacttcatcgaagtcttgaacccagatctggttgatctgtttcgcgttgttcacttcaccgctacgggcagtcagtgcgtaacgagtgttgatgttagcgccacgggaacagcccattgagccttctacgacaaaatacgggagcttatcgtagtcctggttgtacggatcgactttggagtgataccagtcgttggcatcagagttatcggcgctgttgttgatgtgaccagcttgctcgatgtaagcattgtggatttgaccataatagtccgtaccggttttagtcggcgcctggaatggtacacgggatgtccagtacgttttggcgttctcgatgatgacactcaggttgccacggttataacgagagtagttgatccacgcgcgatgacagatgccgcggtatttctcatgcgggttatccgtatcggcgccgtactgatccatgttggtcagacgccctccttctgaggtcttaaccgagtttttagacttatagaaatagtcatcaaagaacttatcaagctcgaagtgcttatcgccgaacttgttattacttccgttaccgacggtgatgtatttccacacacagtagtcacaccaccccagagaccagatgtccatggtggtataaggtggcacccattggccgccgtattgaacgttgttacgctgtagccacataccgccgacaatgaacgccgccatgcagttatccatggtttggataccgaagaagcagctatctgcgccctgaagcaaaacggggatgccgcaattacggtagatcatatcaccgaagtgtgactggtcgaaaatgacgccgtcggacagaatgccgatgaaggcattttgaatggtgaggtcggcaacacctacggcgcggacgaaccctgtcatgcgagttgtggttgggtaaccgtctggacggaataagatgccaatacgctggtctaacccaacgccgtgtacgtcacgcgaccagccaaaatcaagaatagtgttgacttgtttagagccacgcagttgaaccctgctcgggatctccagaacagcgttcatggtttcctggggttcaggacagatatccttatctttgcccatcgcaataatggcaggcgccgctgttccatcatcgaacggtaaagtatatttggcactgtacgaatagaaaccgaatcggtatacattacccatacacagaacttcaccgccgccatttttcttagcggcattaatggcggattgaaacgccaccgtgttgtcgaactgccagtctcctggtttggcgccgaagttctccacatccagtgtttgattgacacgcgtccaatagaatccttggccagcggcgataaaaccgttatcgtcgacgccatccccaatagtggcaacaaactcaccgccgccaaagcgaagccctggcaaccaggatttcagaagaatgcgatcaccggtggcggagggtataacagtacgaagttgttcgaaactttctacctgattgtctatttgatcactcattggaaaacatcctgttagatatagagaacattaatgttaatcgttaacaaaacaccgctgtaaaaagcgcggcactgatttaattccttaatcttattttttctttggatcacggatgaaaaagattgatgtcatttgctctcgttagcctgaagttcacatccttattcgcacagctatgctgttgtaaacaccacccttaaagccttccagataaattatgaccacaaagatgcatcggtcaagaaatcatggcgaatttctggcaacaccattaatttattgaatttttactgtccattcattatttaatgatattcactcacctgcaatatttagaaagtaaaaagccgacaaaaacgaaaaaaattccgaaataagcagcctattgaaattatttgcctgcgcctggataatgtgcagaataaatggacagtgcctttcagaattgggaactggcactgtcaaagttagccatttattttgacagacggcgaattacgcaatgatgttgtcgatttttaacataaacagattctgaactctttctaatctgatgttgaaaaagcactactataatgcattcctaaaagcgttggctcatctgaacaccactaacagccaaagataaccgtacgatgattttttattgttcacgtcctcgataaatcgcgccctttttccggcagatcgaaaatcaccagcgtgcctgcgctgcccggcaacacgcggtgcggcacgccggccgcggcctgatacagctgaccggcccgcaccaccacttcttcccccgccacctgcagccgcaggtggccgctgatcaccagcaacccttcgctgtaatcatgcacttcatccgcaatgctgcgcgcatccatgcgcagcactttgatattggccgcaccgacgcggcccagcacggcagagcgccaggcttcgggcagttcggccgcctgctggtttaaatcgaacagcatcggaattcccccaggtgcatgaaaaagcgcactctagcctgattctgcgccgcagggaaagacgctttggttgcaggttatgaccgttggttctgaggcgagacgcgccggatgaacgcttaaggcagcagcgccgcggcctcccgatcggcgataatcaacaggtccggatgcagcatcaaaatgctggcgggcactccgctctccaccggcccgctgacaatgcgccgcaaaatgtccgctttgtgcgaaccgttgacgagcagcaccagctttttggcggccatcacgcttgccggccccagggtgacgtaatgatcgggcaaccattcagtgcggccgcccacctctttgagcaaaatgtccgccatatccggcctggcggaaaccggcacccgacaggtgcggtcttcgaaggcggtggtgcccggcagattgccgcagaaatgcccgtcggctccgacgcccatcacgatcgcatccagcccgccatcctcggcgatacgccgatcgtgctgaaggtagttgtccgaattcaagacatgcagttgccgctcggggatcgccgccgggccaaagaacatacggtgcagattctccatggtgacgccatagcccgatcggccggcgtaaggaatttcatcgaaattatagtaatgcgcgttggcgaattccgcgtggcccttgatgcgcggagccaacaactcatacatccgtttaggcgtcgagccggcggtgatagccagattgacgcgctgcgggcgcagcatgtaactcaacaacaggctggcggccaactcactcatttcctggtagtcattagcgacgacaagtttcattcccttctcctttttgcaaaaaaaaacctaaccgcccgtccggccatgttcgatgccgggagagaagttaggttttgcctgatcgcgtcagtaacaatccgtttcttgtcaggttatggcggccagcaatgaaatgcaaaccgcgttgtgtgatgcaagccgcaattgcggcgatgcctttttcgcgccctataccggcacgcggcggctaatctccaccacctgatcgctgggcaggtagtaataatccgtgacgtgcatgccgttgcgcaccatcagcgcgaacaggttgcgctgccaggatggcaaccggtcgttcgcttcgcggcgcaccacggtctcgtgcccgagatagtaggtcgcctcgccgaagttcagaccggatttctgcgcctcgacgtgctgcaacagctgcgggatgttaggccgctccataaagccatagctggccacgccgcaccaaaagcccggcgacagctcgcgcatcaccaaccgttcagcattcgagacccgcggctcattgacgatggcaatggtgagcgccagcacgttggcgtgcagcgaaccgttacgcttgacctgccatttcatcaccggcggcgtcccctgcaggctgcgagtcaggaataccgcggtgcccggcacgcgcggcacggattcgcggcggattttctccaggaaatcctctaccggcactgtcgtttcaccgagggtgcgcgcggccgccagcaccccgcgatgccagaccagcatcacggtatagaccgcggcggccaacagcagcgggatataaccgccctgcagcactttagtcatgttggccgtcaggaagctcaaatcgaccacgaagaaaccgcccgccaccaacaggctggcgatcggcccccagcgccacacctcgcgcatggcgacgaacagcaggccggtggtcatgatcatggtcaacgagacggcgatgccgtaggcggcggccagattgtccgacgatttaaagaacacggtcaggaacagcgtcaccaccatcagcagccagttgatggcgccaatgtagatctgcccgtaactttcctcggtggtttgcttgacccgcagccgcggcagccaccccagttggatcgcctgccgggtcatggaaaacgcaccgctgatgatcgcctggctggcgataatcgtcgccagcgtggccaggatcaccagcgggatcagcagcgccggcgggcataaacggaagaagatgttctgcgtgacatcggcgccgctcaggatcagcgcggcctgaccggcgtagttaagcaacaggctgggaaaaacgatgccgaaccaggccagccaaatcggccgtttgccgaaatggcccatatcggcatacagcgcttcggcgccggtgacgcacaaaaatacgccgcccagcaccaggaagctggtcagtccgttggagaacagaaagtgaatgccgtagagcgggttcagcgccagcaaaaccgccggatgctggatgatgccccacacgcccaacgcagcgatcgacaggaaccacagcgccatgatcggcccgaacacgcggccgatgcgcgcggtacccagcggctgaatggcgaacagactgagcaaaatcaccaccgccgccggcagaatatagggctgcgacgccggcagcacgatgttcaacccttcgagggccgagagcaccgagatggccggcgtgatggcgccgtcgccgtaaatgagcgcggcgccgaacaggccggcgaacagcaccagcggccgggattttcgcttgctgaccagcagcgacatcagcgccatgataccgccctcgccgcggttgccgatgcgcatggcgaacatggcgtatttgagagaagtgacgatcaccagcgtccagaatatcagcgacagcaggccaaggatcaccggcgccgaaggcgcgtcgccggagagaaacagcacggttttcagggtgtacagcgggctggtgccgatatcgccgaacaccacgcccaatgcgcccaacgccagcggcgccagccccgtcttattcacggtttccgtatcattgccgacagacatctgctcgctccttgacgttgcgctgagagtgggaattgttgtcactttatggccgtcgcgccacgtgatcggcaagttaagcatagccgtcatcttcgccagtgacagtatcgcgctttgaagcttcagcaatcatcgccggtgagcaacggtttaaaaacgcccaccccggagggcctatcactttcctgttggcgtggcgcgcgtcgtgggaaagtgaaatgaacgtccggctctcccctgtttaagcccggtgttacgcgagccggctctcatcggcttcgcggcgcagccactgccgcagattttcgccttcctgcgacagctcgctatccagtcgagcgcacaggtaataatcgcggccgtcatcgatcggcagatcgaacattttgatcaactcaccgctctcaaggtagtgggcgattagcggttcacgcatcaacgcgcaccctaaccccgcctgcaccgccgccaacgtcaacaatccatcctcgaacatcgggccgatactgcgcagcgggcgcttgacgccggcctgctgaaaccattgcatccaggtattgcgctcctcgtcatgcagcagcggcagcgtcgccagctgatccggcgtatcgagcagaccgtgcagtttactgaatgcccggctgcacaccggcaccatttttccggacataagcttctcgctgcgatagccggtccactgcccgaccccgaagcggatcgacagatcggcggcgtcgctcaggtaattgcggtggttggcgtagaccacattgatgtcgatatccgggttttcacgcagaaaaccgcgcagccgcggaatgaaccagcccatgccgaacagcgggatcaggctgatggtcacctgccgcgacgcggattgttcacgcacgtgttcggtcgcctggcgcagcacgttgaacgccgagcgaatcgagcggtagtactcccgcccctcgctgcgcaacaccaggttacgcccctgccgttcggtcaacggcatctgcaaaaatgcctccagcgttttgagttgatgactgaccgccgaaggcgaaatcatcagctcgttagccgccgcgctgatgccacccaggcgcgcgatggcctcgaacgcccgcacggcgcgcagcggcggatcgttaggcagcatcggcaatggctcatcgtactgttctgtttttttcatatattgactgtttttgggaaatcgacactgaaggaatggattcaatatacataaaaatcaatacattaaaatcactcgttttttgtataagaaagtatttttccgtattttacaatttttttaaattctctactgtgagcctctgactcattatctccggactctccttatggatacgctggtacagcaaaccgtcaacggtttgatgctcggcagcatttatgcgctgatcgcgctcggctacaccatggtgtacggcatcctgcgcatcatcaacttcgcgcacggcgacgtactgatggtcggggcgctgagcgcgctgtcggcgataaacgtgttgcaacaccactttcccgcgttatcgccctacgccacgctgctgctggcagccctgtgcgccatggcggtctgcgccatcacctcgatggcgatcgagcgtctggcctatcgccggttgcgtaatgcaccgcgcctggccccgctgatcagcggcatcggcgtctcgctgctgttgcaaaccctggcgatgctgatctggtcacgcaatcccctgatgtttccgcagctgttgccgatgacgcccatcgccctgaccgcaggcagcgccgaacatgcgccggcggtgatcaccggcacggcgatcgtcacgctggcggtggccgtagcggtgatggccggcctctggctgctggtcgaacacagccgtttcggccgcgccatgcgcgccacggcggaaaacccgcaggtcgccggcctgatgggcatcagtcctgaccgcatcatcgttctgaccttcgcgctcggcggcgcgctggcggcggtcgccggcatcatgatggccagcaactacggcaatgccggtttctcgatgggctttctgcccggcatcaaggcgtttaccgccgccgtgctcggcggcatcggcaacctgcgcggcgcgatgctcggcggattgctgctgggcctgttcgaatcgctgggcaccggctatctcggcgagctgaccggcggcgtgttcggcagcaactaccaggacgtgttcgcgtttctggtgctgatcgccgtgctggtcttccgcccctccgggctgttgggcgaacgcatcgccacgcgcgcataaggacatcaccatgaccgttttgactccccccgttcctctggccacgccgcgtcgcgccaggctggggctgacgttgttcattctcgccctgctgctggcgccctgggtggcgggcgccgccggcggcaactattgggtgcgcgttgtcgacttcgccttgctgtacctgatgctggcgctcgggctgaacatcgtggtgggcatgaccggattgctggacatgggctttatcgctttttacgccgttggcgcctatctggccgcgctgctgtcgtcaccgcatctgacgcagcagttcccgctgctgctgcagtggttccccgacggactgcatctgtcgatgctgtggctgatcccgctggcggcgctgctggcggcggcgtgcggcatcctgctcggcgcgccgacgctgcggctgcgcggcgattatctggcgatcgtcacgctgggctttggcgagatcgtgcgcattctgatgcgcaacctggatcgcccggtcaacctcaccaacggccccaaaggcatttccggcgtcgatccggtcagcctgttcggcctgaagttttccggcatgcatgagtggttcggcgtgcgtttttccggcctgtacctgtattactacctgttcgccgcgctgcttctggcgatcctgtgtatcagcctgcggctgcagaattcgcgcattggccgcgcatggacggcgatccgcgaagacgaggacgccgcgcgggcgatgggcatcaacacccgcaacttcaagctgctggccttcgccatcggcgccaccttcggcggcgtggccggcgcgctgttcgccgcgtttcaaggcttcgtgtcgccggaatccttcaccctgcaggaatcgatcgccgtactggcgatggtggtgctcggcggtatggggcacatccccggcgtgatcctgggcgcgctgctgctggccgccctgccggagctgctgcgcagcagcatggggccgctgcagcaggcgctgttcggccaggtgctgatcgacccggaaatcatccgccaactgttctacggcctggcgctgatcctggtgatgctgtatcgcccggcgggcctatggccggctcgccatgccgggaggaacgccgcatgacgccgctgctcactttaaatcacgtcagcaaacgtttcggcggcctgacggcggtggatgacgtcagcatgagcatccgccagggggaaatctacggcctgatcgggccgaacggcgccggcaaaaccacctgcttcaacctgatcaccggcctgtatcgcgccgacgagggcgagttctgcctgttgggccagcgctataaaccgcaggccatcgacaaagtggcgcaggccggcatcgcccgcaccttccagaacctgcggttgttcaacgaaatgagcgtgctggaaaacgtgatggtcggctgccatgtgcgcacccgcaacggcctgtgggcggcgatcgctcgccacgggcgcgctaaagaggaggaacaggcggtgcgcgataaatctcatgcgctgctggaatacgtcggcatcagccaattcgcccattaccgcgccggcgatctcgcctatggccaccaacgccgtctggagattgcccgcgcgctggcgaccgagccccggctgctggcgctggatgaaccggcggccggcatgaacgccggtgaaaaagtggcgctgcgcgagctgctgctgcgcatccgcgacagcggtaaaacgctgctgctgatcgaacacgacgtcaaactggtgatgggtctgtgcgatcggctgacggtgctggattacggcaaagcgatcgccgaaggcgagccggcgcaggtgcggcgtgaaccggcggtcattcaggcctatctgggaggcggcgcgcatgtctgaagccctgctgagcgttaaacgactcaaagtgtcttatggcggcattcatgcggtcaaaggcatcgattttatggtcaacgccggcgaacaggtgacactgatcggcgccaatggcgcgggcaagacctccagcctgcgagcgctgaccggcctgcagccgttcgaaggcgacatcctgttcgacggtttctcgattcgcggcgtgccgccgcaccggttgctgcaacgggggctggtgatggtgccggagggacgcggcattttcacccgtttgacggtacgggagaacctgcagctcggcgcctatgcgcggcgcgacaaatcggcggtgcggcaagatttcgaacgggtgtgcgccaccttcccgcggctgagcgagcgtctgcaccaaccggccgggctactttcgggcggtgaacagcagatggtggcgatgggccgcgcgctgctcagccgcccgcggttgctgatattggacgaaccctcgatggggctggcgccgattgtggtggaagccattttcacggtcatcaagcagttagcccgtgacggcgtcacgctactattggtcgagcagaacgcccgcctggcgctggagtccaccgatcgcgcctatgtgttggacagcggcagcctgagccacagcggccgttccgccgacatgctggacgatgaaaaaatcaaacagatctatttgggtgaataaccgttgtttcttttaaccgcaccaggagtatgacatgcaacagaacattcgcatcaaaccgttggcgctggctgccatgacaatgattcttagcctcccggcgctggcggccgacaccgtgctgatcggcctggccgggccgctgaccggcccttccgcgcgcatcggcaaagatctcgaaaacggcgcgcaactggcgatcgccgacgctaacgcgcagaaaccgacgctgaacggcaaaccggtcaccttcaaactggtgtccgaggacgaccagtccgatccgcgcaccgccgtggccgtggcgcagcgtttggtcgacgaaggcgtcgccggcgtggtcggccactggaacaccggcaccagcatcccggcggcgcgcatctatcacgacgccggcatcgcccaggtggcgccggtcgccaccggtcacggctatacgcaacaaggttttgacaccagctttcgcgtgatgggccacgacgacgacggcggcaactacgccgggcaatatgcggtgaagacgctgaaagccaagcgcatcgcggtgatcgacgatcgcaccgctttcggccaggggctggcggacgaattcatcaaatcgctgcaggcccagggcgtgcagccggtcgcccgtgaatacgtcgatgacaagaccgtcgatttcagtgccgtgctgaccaccgtgcgcagcaaaaacgccgatctgatcttctttggcggcgtagattcccaggcggcgccgctggcgcgcaaactgaaacagctgggcatgaacgcgcagctgatgggcgccggcggctttgtcagccaaaccttcctgacgctggcgcagcaggaaggtgaaggcgtcgttgcgttggagccggggctgccgctggaacagatgccgggcggcaaggcgtttgagcaagcctaccgcgatcgttaccacacccacatcgaactgcatgcgcccttcgcctacgacgccacccgagtgctgatcgccgccatcgaacaggccggctcggccaacccggccgattatctgccgaaactgcgcgccatacattatcagggcgtgaccggcgccatcgccttcgatgcgcagggcaacctgcaacagccgagcttcaccctgtatcgggtggttgacggcaaatggcagccgcaaaccgtgttgggcggcgccaaaccacaataaatcaagaggagcaaggcgatgagctgtgcaaacaacgagttgggcattttggcccgcagaaaaatcgaggcggagatcatcaaaccgatctaccagatcctggtgcgtgaaatcggcaaggcgcgcgcccaggcggtgatcggcgaggccatcgagaatgccgccatcgcggcgggcaaacagttcgccgctcaggaaccgaacggcgcggatctgcgcagcttcgccgccttgcagtacctgtgggaaaaagacgatgcgctgcgcgtcgaggtgatcaatcaggacgaacagcacttcgactataacgtcacccgctgccgctacgccgagatgtatcacgagatggggctgggggagatcggccacctgctctcctgcgctcgcgacagccagtttatcgtcggctatgcgcctgacgttgaactgcagcgcagccagaccatcatgtccggcgccccctgctgcgatttccgctacaccgctaaaacaccgggagaagatcaatgacgtatcgggtcaacggcgagcgcctgtggcaaagcctacagacgatggcgcagttcggcgccatcgccaataacggcgtcacccggctggcgctcagcgaagaggatcgtcaggcgcgcgaccagctgcgccggtgggcgctggaggcgggttgcaccgtacgcgtcgacaaaatgggcaacatgttcctgcgccgtgaaggcgctcgccccgagctggcgccggtcgtcaccggctcgcacggcgactcgcagccccgcggcggccgtttcgacggcatctacggcgtgctggccggattggaggttattcgcagcctcaacgatcggcagatcgtcaccgaacgcgcgattgaagtgatcaactggaccaacgaagaaggcgcccgcttcgcgccggcgatgatcgcctccggcgtgttcgccggggtatttgacctggaatacggcctgacgcgccgcgacgagcacggcgtcagcctcggcgaggcgctggagcgcatcggctacgccggcgagtatccggtgggcggcgcgccgatccatgccaccttcgagttgcacatcgaacaggggccgattctggaagcggagcatctcgacatcggcgtggtgaccgccgcacaagggcagcgctggtatgaactggaggtcgtcggcttcagcgcccatgccggcaccacgccgatggaccgccgccgcgacgccctgctgggctttgcgtcgctggccacagcggtcaatcgcatcggctgggatttcgcgcccgacgcgcgcgccacggtgggcatggcgcaaattacccccaattcacgcaacgtggtgccgggacgcgtctttttcagcgtcgaattccgccatccagaggagtcaattctggagcagatggagcagcgcctgctggcggcggtgaacgccgtcaacgacggcagcctgaccgcgcgcgccgagcgcatcttccagtatcccccggtcgctttcgatcggggctgcatcgacagcgtacgtcatgccgcgcaagcgttgggctatcgccatcgcgacatgatttccggcgccggccacgatgcctgttaccttaaccgcgtcgctccgaccgccatgattttcattccctgcgtggacggcatcagccacaacgagcgggaagatatcacccccgcctgggccgtcgccggcgccgacgtgttgctgaacgccctgctggcgcacgccggcgcctgatcctcaccccggtttcttgccggggccaaaaaatattcaacaaaacggttgaatattagcccgcctgttctatattcaaccatatggttgaattatcttcctcacagctggacgccatttttcatgcgctggccgacccgacccgccgctcgatgttacgcgcgctggccggcggtgagcgcagcatcggcgaactggccgcgccgctgcagatgtcgttcgccggcgcctccaagcacgtgaaagcactggaacatgcgggcctggtgcaacgcaccgtgcaaggaagaaaccatatctgccggctcgaacccgagcctatggcgcaggccatgcactggctgcaaacctatgaacatttctggactgaacggctggatgcgctcgaacaggcgctgctgcagcccgaacagcttcctcccaaggagtgaaccatgaatgattacggtatgattatcgaacccggcacgctgcgcatccagcggctgctgcccggccccatcgagcgggtgtgggcttacctgaccgaatccgacaagcgcgccacctggctggcggccggcgccatgaagttggaaaacggcgcgccgctggagctggagtttcgcaactccgatctggcgggcgagcacgagccaccgccggccaagtacaaacagcacggcggctgcgtcagcaaccgcggccacatcacctgcctgttcccgccgcgcctgctgagctttacctgggccgaacaggatcagggccgcccttccgaggtgaccttcgagctgacggaacagggaaacgcggtgctgctgacggtcacccaccggcgcctggccaaccgcgacgagatgctcagcgtcgccggcggctggcacacccatctggatatcctgctggatcgtctgcacgatcgggcgccgcagccgttctggagcacccatgcccggctggaagaagagtaccgcgcccgcctgtaattacgactcgtccctgcgcctgaacgccagataaccggcgatcagcgtaaaactgccgaccagcaacaccagcaggataaaaccgtggtgattgctggccagcggtatccctccgacgttcatgccgaagaaaccggcgacgatgttgatcggcaacgccagcacggtgatcaccgtcagggtgtagagcgtacggttattctgctccatcagcttggcgcccagttcttcctgcagcagccggatgcgttcggtcaggctggcgagatcgttcaacaccacggtgaactcttcggtaaactgccgcagatcctgcaccacctcgcggctcagccaggccggcggccggttcaacaggcgaaacagcgcggccggttccggcgccaacaggcgctgaaagcgcaataacatgcggcgcatgcgccccagctcggcgcggttgcgcttgacgcggcgggtcagcaggcgatcctcgatggtatcgacatactggttagcctgccgcaccacctgctccagcacgtcctcctgctcttccagcaggtgcgccagcagctcggtagacgatgccagctccagcgccgtcagccggccaagcagccgttcaatcaatcgcaccggtttgtgacgcacggtgaccaccagcccacggcagcaatagagccatagcgtcgccgtttccgggttgctgtcctcagggtggaaaatcacgtcgttgagcaccgcgaacagatcgtcgccctggcgctcgatgcgcgtggtgtgggaaccgtgccgaatttcatggaagaaaaaatcggaaatggcgaaatggtttttcagccacttctccgccgccgcgtggttgagattgaggtgcagccagataaaaccgtcgccgggcgacaatgtttggtaagcctggcaaacctgctgcgagttcaggcgcgccggcggctcgccggagcgaaacgcatggccgtagatcagcccggtcacttcatcatcaaaatccagcttatgcatcttttccgctgccgtttgcaccataacgccttatcctgcctatggccgttagcccagatcgtccacgctgttataacaatctttatcgctcggcgttaatgattttcaacgctcttgctcattaatattttcgtcataaaaacgtcatttcattttaaaagttttcatcccctgcccgttcagcaaccgcacaaacggggccgcattcgcggtcgctttatcagctaaagaatgggctattcaataaatcccagtttgaactgcgccttgcccgccagcgacatcaggctcgcatcttcaggataggtcgccagcagcgggaaaaagactgcgccgccgataatgctgcggcgctttgaatctgccgggcgcagcccccagatattctggtacgtcatcggtacaacctggccgtcaacgagcgcattgccgatatacagcatgatatggcccggaatataaaccagcgtggtgaagggtttgccgtgatctttgagatagcgcagccgttcacgggtgttcgcttgagcaagatcaaccacccgggtggccgcctgtatctgcgcggcggaatttctgggaagaaagaggccaaaaggcatcaacagactgcgcagttcggcggagcagtcattattgaagttatagttcccccagccataaggcctgccgctcattgaccgcatcagtacggcaaaatgttcgggcgtcattttccacggcatggcggcaaattcccccttcttgacaacgatccggcgcatctgtgcgcggccatcctctcggcgtaccggcacggcgaccacaaaaagaccctgtcggtgacggtaaaatggcaggatcgtgccgtggcgcgccgtaaaataaaattggccgccggcttgcaccgtgaccggctgtttaatgaatgcccccagatttttctccgccagcgccagccattcggtgacaaactgccgatccaccgccgcgatgtcttcgctatgcacccatccgatcaccgttggcgacgcgacgtagttccagcgtttatcgcggctttgcgtaataacgtatacaggcgtaccgggacggatagatgaatcctgtaaattatcaaacggataaccctgtccagccaggcgaggatcgtcataagccggatcggccgtcggcaggatcctgaccagcgtttccctgactgcaatgcccctgcccgcaggatggaacgccttatccatgtcggtcgacgcgttatctctgacttgctgtttccagcggtcagtgtgagtcctgaagttttccccccaggagacactttcacttcccaggtatttatccattgcggcatcacggcggctttgcgcttcacggttcaggacggaagcgatgtaatgcggattccagggggattgatcattcggccccatgccaaaatagtgggatttgagggcggagaaatggcgctgctgcgcggcggcatccatcacaggcacccgccgttgcgggccataggggatccatttatcgacagattgcgagtagttacccagcgggaatagcgatttggtcgcatcgataggagttgtcgctacggcgtcttgaggtggctctctgaccggcgcactatggcaggccgacagcaacagaagcatcatcaatacaaagggttttattccattaggcattttttatcatctccgtgacaggtgaaaatttcttcttcatcctgaccagaagtgattgcaaatgatactcaataacactatcgattgacgcccggttgaggaacaaaacgcaaaagcaagcccgcccgcttgctcctgcgccctcacattctcaccacgccaacagacgttccagcgccgccgccggccctttacggccgataagcgccgcccgatgccagatagagccgctgtcgctcacccactgctcgcttacccactggctccgggccaggctgcgcagtgcctggatgctgtcgacggtgttatacaccagccaggcgccgaacaatacgccggccaaggcgatccacagattgaccgttgcggccagctgcgcgatcaacaacagcaacagcgccatctgcagtaaggttttagcggtgaaagcgcacagaaagaaggtccgcattcggttttccagcgcaaaacaggggttggttaacacctggcgggtttcctgtaccggaatgccttgcacatagaccatccattgcgaagcccgtcggggattcatcgccacgcccttttccgccagctggtgtaaccgcatcgaaacggcgaccggccagacgagcgcgagcagcaggcaatagaagaacgccgcactgacgccgcacacgcccaatccgatcgcggccagcaccgccagcagagccttgccggagtaaaaccaaaacggcaccacttggtaattcataaagttcccttttaagtccattaaccagtccgatagattactcccttatcaaggcgttaaacgcgagggaacaaaaaatttttgctgttacgcagaacgcgatcggcccctctatcctgcgccgccaaacctgctaacctgcgcattttgatttttgacaggagtcttccatgcgccaacgcatcattgtctgcccgctgattgaaaacgataacgccttcctgctgtgtaaaatggccgcccacaaaggcgtatttcccggccagtgggcgctgtccggcggcggcgtcgagccgggtgaacaaatagaacaggcgctgcggcgcgaagtgcgcgaagagttgggcgccgcgctgatcctcgacaacatcacgccctggactttccgcgatgacgtgcgcgtcaaaacttacgccgacggcagccaggagcaaatctacatgatttacctgattttcgactgccatgccgccaaccgcgacgtgacgatcaacgacgagttcgatgactacgcctgggtgccgcgcgagcgcctcgcggactacgatttgaacgaggccacccgcttcaccctgcggcaaaagggattgttgtaacagtttgagcgattatcgccctatttccttcacatttgccgggcagactcttttgatattttttaatcacttagggtcactattgccgccgttatgcttttatctcacgcttttctccgtctgcctgtccggcgcttcagcgccgccctgctgttcagcctgctgttcgttttggcgcccgtgcatgccgctgcaccgccgctggtgctgaatgccaaatcggtgctggtcgtcaatcaacgcaccggaaagaccctttatcagaagcagccgaaccgcgtgctgccgatcgcctcgctcaccaaactgatgaccgccatggtcgccctggacagcaaacgcccgatgggcagcaagctcaaagtcaccgccgccgatcgcgatctgctgaagaaaacccattcgcggctgaccatcggctcggtgctcagccgccgcgacatgctgcacatcgccctgatgtcttcggagaaccgcgccgccgccgcgctgagccgcagttatcccggcgggcgcaaggccttcgtggcgaaaatgaatcagaaagcgcgcgccatcggcatgaaacgcgcccgcttctacgatccgaccgggctgacgccgcgcaatgtggcgaccgccaacgatctgctgaagatggtcaatcacgcctatcgctatcagtcgattcgccgcttcagcaccgacaagcagcagatcgtgcgccccggccgcggccagttggtctaccgcagctccaacggcctgatcaacaaccccgcctggaagatccagctgcagaaaaccggctttaccgacgaggccggtcactgcctggtgatgcgcaccaccatcaaagggcagccggtggtgatgatcctgctcggcgcgcagccgcgctacggccactaccgtgacgccattcgtctgaaggcctggctcgaggggtaacatcgcggcgctttaccgttctgcgcatatccaaatccgttttggatcaatggaatatcctatcgccaatcagtattaagccgtgcgctgcccgcatggtatttgtcaggcatatctgatgaggaaaggagcgggaaaaatggcttatgccttgagcatattggaaaaaagtccgatagccgacggggaaagcgccgcgcaggcgctggcgcgcacgctgcagctggcgcaacgggcggaacgctgggggtatcggcgtttctggctggccgagcaccacaatacgccgcagctcgcctgcccgtcgccggaagtgctgatcggctatctgctcggccaaacgtcgcacattcgcatcggctccggcggcgtgatgctgcagcactacagcgcctacaaggtagccgaaaacttcaacctgctggcggcgctggcgccagggcgcgtcgatctcggggtgggcaaagcgcccggcgggctgccgctcgccacccaggcgctgcaggccgcccatgaccggcaaaacaaaccggccttcccgcagcagctgtcgcagctgaccgcttacctgaacgacgacgccgaaccgggcctgagcgccacgccgctgccgccgcagggcgcgcagcgttttctgctcggcgccagtaaagagagcgcgacgctggcggccgagtccggctgggccttcgtgttcgccgcgcatttgaatggcaatccgcaggatatccgcgacgcgctggagcactacgccgcacacagcggcggccgcaaggcgctgctggcagtggcggcgatcgtggcccccagcgaggaacaggccgcggcattggcggcggagattcagcaataccgcgtgcacgtcgccggtgagcagagcgtgaccgtcggcagcctggcgcaggccgagagtttcgtgcagcaggccggcgccaccgactaccgcatcgagccgcgggaaagccatattctgctcggcaccgcgcagcaggtgcatcagcaactggcgcagctacagcaacagtacggcgtggacgagttcatcatcgacacgccgatcgccgaaccggccgcccggttagcctcgctgcagttactggcggaagagagtttgacgccggcttagttgatcgccgccgccgcccgcatggcttcggacagatcctgcgccagcggcgccaactgcgacggcgtgacgttcgccaggctgacgcggagcgccggaccacacttcaggcggaaaggttcaccgccctgcaccagccacccccgctgcgccatcagctgcgcggcggcggtttccgagcgcaccggcacccacagatgcagcccttcacctaccgccagcgccgtgtgattcaacgcattgagccgctggaccagctcatcccgtctggcctgatacgcctgttgcgcccgctgcaattgcccttcctgcaaggcttgttcccacagtctggcggcgatctgctgcaagatatggctgacccagcgttcgctgatgtactgatcggcgcgcatcgcctgcagcaaagtcgggttgccgcaggccagcgcgatgcgcagatccgggctgagaaacttgctcagcgacagcacgtacaggccgcgatcgccgtcgaacggcagatgcagcggctgttgcgacaacggcccccagaaatcgtcgacgatcgccagacactgcggatggccgcgtagaaaacctcgccactgctgcgcacgttgcgctgaaagcgaagcgccggtcggattatgggcacgcggcgtcaggatcaccgcgtcagccgcgccgctctccggcagccgacagccctgttcatctaccgacagcggcagcggccgcaggcgcaggtgacgcagcagcgtcaatagcggcggccagcagggatcttccacccacaccgccgccccaggctgcgcatggcagcgcagcgccttttccatcgcgtccaacgcgccggaaaacaccgccggttcccccagcgtgacgccctggcggctgagccactcgcgtcccagaccggtcaataccggcaggtcgccgctgatgtcatagccgttttgctgcgggaacacctccgccgcgccaagcctcagcgccggcagcaaagcggcatccaggttgccgctggccagatcgcacattcccgccggcacctgacgcggcgcataggtcgcactcaccgccgccagcggcggctccagcaccaccgttcccgcccgcccgcgcgtcgccaccaggccggcatcgcgcaatcgggcataagcgctggcgacggtattcggattgacctccagctccgcagccagttggcgtaccggcggcaacagctcgcccggccgcagcgcgccgtctttgatgcgtgcggcgatctgctcggcaatctggacagcgccgccgccttttgcatacaataaactcatacataaatccttttgtactaattcaaacaagattagcagcttccgcggccaaaagtaaggggttccatggataaacattacgtgctcgacattcagtatgcaggaaaagcctttgcccgcctggagatgttcaccccctgggcagccgatcagctggagcaggcgtgcgcgctgttcccggccgcacagggttatcaggtgcagctcagccaggtcagcgaacgccgcatcgtctaccagagcggcgcgcagggcatcacggtgctgggcgagtcgctggcgctgacgccgttcacccacgctcacgaggttaaacaatgaaaaaagccgtcgccattcgacacgtcaattttgaaaacctgggtattctcggttccctgctctcgctgcgcggctatcagatcgactattacgatgccggtcgcgatgatattcgtgctatcaataatgaaaaaaccgatctgttggtggtgctcggcgggccgatcagcgccgcccggcacttttccggtgagcagcgctatgattttctcgaccatgaattggcgctggtcaaacagcgcctggcgcagcggcggccgaccctcggggtgtgtctcggcgcacaggtgatcgcccaggcgctgggcgccgacgtgatttcgctcggcgttaaagagatcggcttcgccccgctgaccacgctcgcggcccaagacgactcggtgctggcgccgctggccgatacgccggtgctgcattggcacggcgatatgttcatgatcccggacggcgcccgctgcctggccggcacggcgatttgcccgcatcaggctttcgactatcaggggttcgcgctcggtctgcagttccatctggaggcggatcaccgcgatatcgaacgctggttgattggccatgcctgcgagctggagctggccggcatcgcgccccagagcctgcgcgaacaggcggcgcgccacggcgcacggctggaacagcgcgcgcggcaggtgttcgcccgctggctggataataacgaaccaaggatgtaactcatgcaacaggcttcacccttgcgatcaccgtccatcgacgtgatcagcattcaatctcaggtggtttacggcagcgtcggcaacggcatcgcctaccgtgccctgctgaaaaaggggctggaagcgctgcaggtgcccagcgtgctgttcggctgcccgccctattacggcaagccgcatggcggcgtcatctccggcgagtggttcggcggctttctcgacgatctgatcgcccgcggcgtgatgaaacgcacccgggcggtgatcgtcggttacctgggcgacgtgatgcagtgccatattctggccaactggctgcagcgggtgcgcgccctcaatccgcagataaggatctatatcgatccggtgataggcgattacggcgaagggatctacgtggatgagcgcatcgtcaattgctatcgttcaccgttcctgcggctggccaacggcctgacgccgaacggtttcgaactggagcagctgtgcggccgctctctgagcagccgggagcagacgcaacgcgccgcgcaggcgctgttgaacgacaccaccgaatgggtgctggtcaccagcgcgccgggcgtggcacagcacgaagacgaagtgggtttaatgttggtcacccggcaggaagcgcagtgctttacccatccgaaggtcaaatcggcggtcaaaggcaccggcgatctgttcaccgcactgctggtgagccatctgctgcgcggcgccgcgctcgacgcggccgtggttgccgccggcggcgaagtgtgcgacgtgctggccgaagcggcgcatttcggttgggaagagatcggcagcctgcgggcgttaaaaccgtaagacctgtggagagtcaggggcagcatgcccgcccctgataaatatcagcgttttttctttttgttgaaatccagctcgaaggcgaacaccgcgctctgaattttgcgctccatcgccagccccagcttgaggaaacggcacgacaggcgcgagaagtgcaccacctggtcgttatcgtcggtttcctgatcgtcgttgaccaccaccagctccatattgaccttgaagctgccgtagctgcccagatccagctccgcttttttgaactgcaggccaggctggaagaaatccggcagcgggccgtcgaaacgcaaaccgacgccgccggcggagagatcgtggatccgcagctcataaggcgtgccgtccgggtactcgccggtgcagaagaattggcgccagtgcggcgtagtgatgcggaattggcggcggcgctggatatagaccaactcctgcggcagccgggtcgagcaggcctggacgccctgatgttcggtcagttctgcctgaccgacggaaaactcgattttggcgtcgtggctttcaatcacgatggtgcaggcgccgtcgatggcgttttccgcttcctcaccgctaaacacgatattgtccggcccgacgctcaataacagactttgaaaccggtgctgctgattttctacgcgcagcggcgtgcgttgtttgcaaatttcacgcagaatcgccagaacttcaaaacgctcccgtttgataaacagtccgttatcgctgtgctccacacgtctctcctgactttttttctaatgacgtcttatgtattccttatggttatcatctctgggaatattcctaaagtcaaatttgccagcgttgccaggcctgcggcagcaggcgcgcgaaacgtttcgcccatgcctgttgcccgcgttcgtcggcgatcagatcctggcgaatttcgatgccgacgtaaggcaatccgcgccgttccgcgtgcaccggcaacgtgtagtcggtggcgtcggtcattgcatagggctcgttgatccccacctgcaaatccccctcttcgcgcagcagctcggccagcagccgggcgaattccgggtagcgattaaacagcaaccccacctgccaggggcgcgattcccctttgaacaccggtgtgaaactgtgcatggcgatcaccgccgtcggcagttcgcgcagctgacgttgccccaaatgatcgtcgatggcgtggtgatacggcaaaaacacctcacgctcgcgcgccagcgcgtgctcggcgtcaataccgatattgccgggtatcggcgtcagttcggacaaatgcgggatcgagctggcgatgccgggcgcccggttgcagtcgatcaccagccgtgaataacgctggtggatcagggtggcgtccagctgacggctcagatggcgcgacacgctcagcgcgccgatgtcccagccgatgtggcgttcgatctcccccggcggcaaaccaaggtcgccaagggattgcggtatcgccttaccggcgtgatcgcacagcagcaaaaagggcgctttgccgcgcgggatttccacggcggcggcagagggttcatcggcggacaataacggcgggataaacgaatggggcatgacgggctccggcggtggaaagcaaaacgtttatcgtagcgctatcccgtcgccggccccaaggtcgtgcttagatcaaaaaggcatgagtcagactgtagtcatgccgtctcggccggctgcggctggtgcaccgcgatgtaacgctgataccgcgatggcttgagccgcgtggtatccaccaacaccagcccgtcgatacagttgttgaacgccggatcggtgccaaagtcgataaactgtaccccgcccggctcgcacagttcggtgtactgcttgtacagcgttgggatcgagcagccgatattgctgagcaggctcttcagccgcaccagatcttcctggtagttgtccccggcaaactgcgccagcacctgcggcagcgacgccggataaggccgccgcgactgcgcgaacgcgtgatccggcgagaaatagagccgatagaaggcgatcagcaaatcacgtgctgccagcggcatgccgccggagatcgacaccgggccgaacagatagcggtactgcgggtatttcgacagataggcgccgatgcccagccacaaatagtccagcccgcgcttgccccaataggccggctgaatgaagctgcgccccagctcgatgccctgcgccaggatcggttccatatcgcggtcataatggaacaggctgttgctgtagatgctctccaggcccttacgcgcgatttgttcggcggtggggataaaacgataggcgccgacgatctccagctcctcctcgtcccacagcaccaggtgatagtaatcgtcgtcgtagctgtccagatcgcggcggcggccggatccttcccccaccgcgcggaaagcgatctcgcgcaggcgccccagctcgcgcaggattggcgtacgcgcttcgtcatggcgacgatagagatagatggttttaccgtccggcgttacccccaaccgttcgcagttcgccagcgcctttttcagctccagacgatcttccggcagcgcaatcggcgattcgctggcgaacagccccggcttgccctggcccagacgatagacgtggcggcgaaaacgctccgccagatccttggcgctggtgtggccgtcgtgccagttggcgaacggcacgcggccgccgacgcggatcttgatgcgcccgccccgctgctggaacatttcgcgcaccagcagcaaggtcgacagcggccggtagaccagagaggtaaagtagaacaggttgctgttgcgtgcgctgatgtggatcggcacgatcggcgcgcgcgctttggcggccaggcgcagaaaaccggtatgccagtggccgtcgcggatgcctttcgggctcatgcgcgacacttcgcctgccgggaacaggatcagcgccccctggttgtccagctgctgctgcatgccttcaatctgtttgcggctggttttataagcgacgttatccaccggcacgaacaggctgcgcagcggttcaatgtaggtcagcagctggttggccaccactttcacgtccgggcgcaccgcggcaacggcgcgcagcaataccaagccgtcgagcgagccgatcgggtgattggccacgagcaccaccggcccctggctcgggatgttttccagatcgccgtccaccagctcgcagctgaggttaaagtagtccaccacctgctcgatcagatcgagccctttcagatggggataatcggcggcgaactgtttgaattctttttcgaagagaagggttcttagcaggctgcgctgccaggcgggggtattgcggtgtggaaatgcatcttgcaacagagaatccaggctgaacatcgcgttatctcctgacgtagtcgctgcaaacttaagccagagccgtgactctgacatgtcagttacatgacaataaagtgaatccatcgactatcaggtatagcaaagtaatggcgaattgggagcgaaagacgcattttcgcccccacttgccttcacatcggcgccagcaacgcttcgatgcggcggtttaccgcgtcgcgcaggcgcagcagcggcccggcctggtgcggataacgcttgaaggtgatgcgcatgcccagctcactttctataagcgcttccaccgtcgcccgatcggtcaaactctccagcagctgcagcgcgcgcatgtcttgcagcccctggtgcagcacccgcaggcgcagcgactccaccggctgcagatcctcaccggggtagaccacgaacggatcgccggagggaaacgcatggccgctgtcggtcaccgcgtacggattgatgcgttcacgcgaatgggcgctgttatagaagttgaatccccagtgcagaaagccggcgatgcggtacagatacagctgcacgcccaatatgcggttgcgcgccgaaggctgagcgaagaagcgattggcgacctcagtcttctgcacgcagcagtaataggcccacaggccggggacctggtgttcgataaaaggttcgaggtggtcggtcgcaacgaccggggtttccaccaggccttgctgataaaacgcgaaatccgacagcgcatcgaaggtgcggaagccatccagcagcgggcgcagcgcggcgctggcgcgccggtaggccgccaggttgtccaacgtcggctcatcggaaacatggaaccatccctgccgttccagcccccgttcgcggaaccaggcggtcaacgccggcagcagcgcctgcaggaaacgctgatacgcttcgccctgcgcatcggtgtgccagccgaactgcgttcgcgtctcgccctgctcctccaccacgatcttcggcgcatgcgccgcgccccattgggtaaacagcggcgcgatttcgaagtgctcgataccctcttcctgcgccaacgccacccactgcgccagacggctgaaatcgaagccatacccgtgcgccgaatgtgtcaccctcaccaactgtaccgtggtgcgttcgccgccaacggcggtatccagcggcggcgtgaacagcggcgtcagcagcatattgacgccagcctgcaccgcgcagcgcacaaagttgcgcaccgcgcgccagtacgccgggctgaacaccgccaaacggtagtaatccgccaggcagtcggtgtgcagccattcggtgtgcaacagcgtttgcggcggcaacgccgcgggcaccagatgcagcgtcagtgtggcctcggccagcgcctcgccgctctgggcatccagcagccgcagggtcaacggaaagtctccggccagttgcgcgtcagccggcggcgtcagggtcaaccacaggctgccataatagcggcaggcggcaaaaaaacgccgttgcggcagcggcatcagcggatcgggaaataagcccggctcggtggtcaggtaattctcatcggtctcgcgataacagggaaaaccgctcggcaccgattgcacctggcgcacgctgatatactccgccagcggcccgtcgagttgataacacagctcatggcgagtctcattgcccggggtttgcaaacagtacaccgcctgccaggacagcacctcgttatttaacccgctcagccgattttccacggcaatgggcggcatattttggcgatgaaatactttttccaggcaatgcgtaaataccagagacaggcgcatgatatttcgccctctttattttggatgaataaatgttgtgagattcaggctagcgtcttttatcgccacaaacaatagccggcaataaaaaacgttcaagtggcctcctcggacagccccagtaagatttttttgtttatttgcatcacaaaaatgaaagaagctgaagcttgcacaataaaaatatttttaatccccattatggtgcaagggttatcagttattcctatgcctgcgaaggccgctaaatgccgcgccaccggggaaaaatcccgccaaaaggttaatgagatgtgaacaaaaacccctttcacttggccgtaaaagcctttcgattttaacaacaatgaaacattatcgccccatttttgggcgtttgggggtgtattgacacattgaaagttaagggatagaaagaatttacgttgcgaaaaacgctattcgtcgctcaccgaggggaaagcaatgtcaccgataaaaaataccggccgcctgctggcgcattctattcttgccagcgcattattattacccacactgctccatgccgcagataaaataactttacgctatgccgtttgggacagaaaccaattacccgccgaacaggagattgccaagcgttttgaacaggctaatccggatataaaaatagaaatagaattaactccctcggcgcaatatttcgttaaattagattccgccgccgccggcggcgtagcgccggatatattctggatcaatatgccttattttgtgcagtacgccaaaaacggcattatggagccgttggcgccctatattaaggacagcggccttaaactggacgacgtggtcgccagctcggtgaaagcctatcagtacgacggccaacagatggccatcccgcgcgacgtcgattccatcgccgtgtggtacaacaaaaaactgttcgatcaggccggcgtcagctatcccaccagcgactggagctgggacgatctgaagagcaaagccgccgcgctgaaaaacgggctgaaaggcgccgccttcccgctggtgatggacctcagcatcgacggccaggacagctacatgaacctgctgttccaaaacggcaatcacatcgtgcccaaggatggccagcctaccgacatcgccaacgacaagtccatctgggtctatcagcaactgcagggcatgatgaaagacggcctgatgccgagcgcccagcagatgagcgaagtcaaaaccgagaacatcttccagtccaaccgcgccgcgatggtctatgccggctcctggctggcggcgccgttcgccaataacccgctgatcaacgaccacatcggcgtggtgatgatgcccaaaattgaacgccagtccggcgtggcgcacagtctggccttcgccatgtcggcgaaaagcgcccacaagcaggccgcctggaaatatatcgccttcatgagcagcgaagcctcgcaggcggagctggccaaggtggtgatcccggccaacaagacggcggccaaggtctgggcgcagcagatccaaaaggttgacgtcacgccttatatccagacccttgaagtgacccaggcttaccccaccgccggcaccaatacgccgaagtggcaaaacatgtggatcgccagcctgaaaaagatctttatgggcgcggacgctaagcaggaaatggacaaatcggtcaagaagatcgcgcgcgtcatggagcagtaatcaccccgccgcggcgcgcagccccgagcgcgcgccgcgggggaaccacgctgaacgtcataggtgaggaatggcaacatgtcgctggcagaaacggctacggtcaccctgaaacacccccggcgcaccgcccgtcccgcgctcaatcggctcgaacgcgccgagcgcttctggggctgggtgatgatcctgccgctgttgttgggggtgacggtgttttacctgatccccttcttgcaaaacatcttttacagctttaccgatctgaaccaattcatgcgctggagcagcatcagcgtcgataactatctcaacctgttcgaagacgacgacttttacaccgccgccgccaacaccctgttctacgtggtggtctgcgtgccgatcagcctgagcctgtcgctgctgctggcgatcggcctcaaccagaatatccgcggcaaaggcctgctgcgcaccctgctgttcctgccggcggtcaccatgcccgcggcggtggccatggtgtggcaatggctgttcaacaaggacttcggcctgatcaaccaggcgctgggcctgctgcacattgcgccggtcgcctggctgtccgatccggatgtggtgcgcatcagcgtatccatcatcatcatctggtcgtcgctggcgctgaagatcatcattttgctggccgggctgcagagcattccacgccagttgtacgaagcggcggatatcgacggcatcggcaccctgcggcgcttcttctgcatcacgctgccgatgatggtgccgacgctgttcttcgtgtcggtgatgagctttatcgagatcctgcaagtctttgacgtggtgttcctgatgttcgaccgcgcactggtggaaaacgacgtgatgaccgtcaccaacctgttctacaagtacgcgttttatctgcaggaaaaaggttacgcctccgccatcaccgtggtgctgttcgccgtcacgctggtgatcaccctgattcaaatggcgatcggcaagcgcctgaaagtcagctgaggagctgcacatgaacgcaagcaagaaaacgctggtgtacctgtttatggggctggcggcgctggcctcggtggtgccttttatctggatgctggtgacctcgctgaaaacccaggccgagagcattcagatcccgctgacgctgctgccggcgcatcccagcctgcaggcctacggccgggtgatgcacgaaatcccgttcgccggtttttatctcaactcgctgctggcgaccttcttcaccgtcaccctgcagatggcgatcgccaccctggccgcctatggcttctcgcgcctgcattttcgcggccgcgacgcggtgtttctggtgtgcgtgtcgatcctgatggtgcccggccaggcgtttctgatcccgcaattcctggtggtgcagaagctggggctggtcaacagcatcaccgggctggtgctgccgggcattttcagcgtttacgccacctttctgctgcgccagtttttcctggcggtgccgaaggagatggaggaagcggcgttgatcgacggttacagctacttcgccatcttctggcgcatcatgctgccgctgatccggcccggcattatcgcctgcgtcatcatcaacggcctgtggagctggaacaacctgatgtggccgctgatcgtcaataccaccaccgagaagctgacgctgccggttgggctggcctcgctctccagccgcgccggggtggaatacccgttgctgatggccggggcgctgatggcggtgatcccgatgctgatgctgttcattattttccaacgctatttcatccagggcatcgccagcgccggggtgaaaggctaacgcgcagacaaggtaaacgacatggccggaattcagttaaacagcgttaaaaaagtgtaccccaacggtttccacgcgctgcacggcgtcgatctggacattgaggatggggaatttatggtgttcgtcggcccgtccggctgcgccaaatccaccctgctgcggatgatcgccgggctggagagcgtcagcgaggggcagatcctgatccacgatcgctgcgtcaacgacagcatgccgaaggatcgcggcgtcgccatggtgttccagaactatgcgctgtacccgcacatgacggtgtacaagaacatggcgttcggcctgatcggcaaagagagcaaggccgagatcgaccgccgggtgcgcgacgcggcggaaaagctggagatcaccaatctgctacagcgcaagccgggccagctctccggcggccagtgccagcgggtggcggtcggccgcgccatcgtgcgcaaacccaaggtgttcctgttcgatgagccgctgtccaacctcgacgccaagctgcgggtgtcgatgcgcgtgcaactgatcgaactgcacaaccagctgaagcaggaaggcgccgccgccaccatggtgtacgtcacccacgatcaggtcgaggcgatgaccatgggcgatcgcatttgcgtgatgaaccgcggcgccatcatgcaggtggataaaccgatcaacctgtaccaccaccccgccaaccgtttcgtcgccgagtttatcggcagcccgtcgatgaatttgcacgatctggcgatcgtgcgcgacggccaaacggtacggctgcgtatcggcctgcagcaccagctcgatctgccgcctgcgctgcaacggcaattggcggactacccgcatgcgcgggtgtgtctcggcatccggccggagtccttgcggctgtgcgcgcccggcagcgccaactgtttcccggcgcagatcgtcactatcgagcgcatgggcaacgaagagctgctgcactgcgaactggccgatttgcgcttcgtgctgcgcatggcgtcgctgccggattgggagccgcgcctcggcgaaaacattcatctggcattcgatctgacgcgcgcgcatttgttcgacgagctcagcggccaaaacctcaaataacaacagcggagtatccagcaatgtcgtcaacacaacccaacagctttgcccatcgcccggtgcgggtgctggtggtcggcgccggggcgcgcggtgaaatctactcgcgctatgcgctggcgcatcccgatttgatgcaggtggtggcggtagcggaaccgcgcgacgcctaccgcgagccgttcgtggcgcagcatgccatcgcgccggaaaacgtcttcaccgactggcgtcaggccgccgacgccggcaagctggccgacgcggtgctgatctgcacccaggatcggatgcacctcgaaccggcgctggccttcgcccgccagggctacgccatgttgctggaaaaaccgctgtcgccggacgccgacgagtgccgcgccatcgtcgccgaggtgacgcgccaaaagctgatcttctcggtcggccacgtgctgcgttacacccgctatacccaaaagctcaagcagttgctgcgcgacggcgcgatcggcgacatcatcagcctgcaacatttggaaccggtcggctactggcatcaggcgcactccttcgtgcgcggcaactggcgcaacgatcggcaggccgcctttatgctgctgcagaaatcctgccacgacatcgactggatccgctacgtgatggagcagccctgcgaacaggtcagctccttcggcaacctgcgccacttccgccaggaaaaccaaccggccggcgcggcggacaactgcctggattgcgcggtagaggcaaactgcccctattccgccaaacgcatctatctgggcgacaatcacaaggccacgcccggttttctgcgggtgctgacgccagagcccgaccagacgacgctgcgggcggcgctgcgcgacgggccttacggccgctgcgtctaccgctgcgacaataacgtggtcgaccatcaggtggtcaatatgcagttcgccggcggccgcaccgcgtcgttcaccatgacggcctttacccgccacgaagatcggcacacccgcatctttggcagccgcggctgcctggagggcgacggtcgccatatccgcatcacctcgttcctcgacgacggtgaaacgcattacgacaccgatgccggccaggatctgcacgccatggccggccacggcggcggcgactactacctgatgcagcactttatcgcggccattcgcgccaacgatccgagccaggtgctggccggcccggcggaagcgctggagagccacctgatggtgttcgccgccgaacgcgcacgccgcgaggcggcggtggtcaccctgagcggagcctaaagcatggcgatgagacagatgcgttacggcttcgacatcggcggcaccaaaattgaaatggccgcttacgatcgccgactcaatcaggtgctgctccagcgggtgcgcaccccaaccggcgattacggcgagttcgtggcctgcatcgccgggctggccgagcaggcggatcgcgaactgcacacgcgcggcagcatcggcatcggtttaccggggatcaccgatcccgtcagccgccgccagttagcggtcaacgtgccctgcctgaccgggcattgcctggcggatgacctgacgcaggcgttggcgcgacctatcgccatcgagaacgactgccgctgcttcgcgctgtcggaagccagcacgccgcaaaccgcgcacctgccgctggtgttcggcgccatcatcggcaccggtgccggcggcggcctggtggtgaaccggcaactgcacaaggggcgcagcggcgtggcgggcgaatggggccatatgccgatatcggcccagttggcgcaacgttacgatctgccgctgttcagctgcaactgcgggctgaccggctgctttgaacgctacgtctccggcagcgggctgctggcgctgagccgccatttctcccatccggccgctgacgtgccggcgctggtcgcctgctatcgtgccggtgatgcgctcgcacaacggttgatgaccatgtacgtcgacatcctggcctgcgcgctggccggcttacagctgctgttggacgtcgatgctttcgtgctgggcggcgggctgtccaacgtcggcgagctgtaccggctgttgccgccggcgatgcgacgctggctgctgcctggcatggagccggcggcggtgttcccgccggtgcacggtgacagcagcggcgtgcgcggcgcagcgcttttaagcgcgccggcataaaaaaaacagtgaaagcccggcggttgtcgagcgatcgctgcggctttcggcatcgatgggctgaatgaataagcgcagggaattggcgactgaaaaataacgaatttgccgttttcactttgcgttaacaccgctttcggttgccgctcaaccgaaagcaaaatcaaatataaccaactgatagatatagatattttaaaattaatcgattgcatttcagtgtttcgtttgctgtaattcgccacgaacaactgaaagcgctccggtcggtatcgctgcggcttattaagccgcggtcgggcacggctacaggtaaatcaggagtctgcattaatgatcaataccgcaaaacgccgggaattaattatcgaccagctgtgccgcgagggctcggtgcgtgtggagcagctcagccagcagttttcggtgtccagcgtcaccatccgcagcgatctgcgtcagctggaacaacacggctgtgcggtgcgcgcctacggcggcgccatgttgaacaaacagttcgccttcgaccgcccgctgcaggacaagggccgcatcaatcgcgacgtaaaacacgccatcgcctgcgcggcggcggcgctgattgaagacggcgacgccgtcatcctcgactccggctccaccaccagccaaatggcgccgcagctggcggggaaaaaggatctggtggtgatgaccaacgcgctcaacatcgctttcgaactggccaacaacgagcagatcgacctgatggtggtcggcggcagcgtgcgccgcaaagcctggtcgctgtacggccccgccgccgaacaacaactgcgccagtatcggttcgacaagctttttctcggcgtcgacggcttcgatctcgcgagcggcatcaccacgccggatccgggcgaagcgcagctgaaccgggtgatgtgcgaggtggcgcgcgaagtgatcgccatcgccgacgccagcaaattcggccgcaccagcttttgcatgatccgcgacatcggccagatccaccgcctggtcaccgacagccgcattcctgaacactatctgcaggcgctgcaccatttagggatcgacgtgattatcgccgaccgttaatcgaggctttttaaggagctgtcatcatgaacgcgtatttctcttacgagacgaattggctgaagcagcgcaacgcctggcataccgccgcagaaatttggcaacagccggatttgtgggcgacgctgcatcgccaactgcaggatcaacaggcgcagtggcagccgttcctggcgccgctgctggccaatccgcgcctgcaaatcgtgctgtgcggcgccggcagttcggcatttgccggccgcgccctggccccctggctgcgcgaacgcaccggccgcgacgtggtggcttacggcaccaccgatattgtcgccaacccgctacagtatctcgacccagaccggccgacgctgctggtctccttcgcccgttcgggcaacagcccggaaagcgtggcgacagtggagctggccgatcaattgctgccggaaagctatcatctgatgctggtgtgcaacccggacagccggctggcgcagtacgcgcatcagcgtggcaacgtctgctcgctggtaatgccgcagggcgccaacgatcagagcttcgccatgacctccagcttcagctgcatgatgctgagcgccgcgctgctgctcggcccaacgtcgcttgaggccgcccaggtgccgttgaacgccatggtgcagcgctgccgcacactgcgcgaaacgctgcagccgcaggtgaaggcgctggccgccagcggtttccgccgctatatcaccctcggcggcagctgctttaccggcctcgccgaagaggcttcgctcaagatgctggagctgaccgccggccgcatcgttacgcgctacgactcgccgcttggcctgcgccatggcccgaaatttatggtcgacggtcagacattggtggtgctgatgttctcccaccacgactacgcccgtcagtatgaccgcgacctgtggaacgaactgcagcgcgacggactggcaatgcagctggtcggattgaccggcgaacgccaacctctcgccgatgccctgctgcatatgcacgatgccgctgacgatatctggctgctgttcccgtatctgctgttcagccaaatgctggccttcgagagttcgctggcgctggggctgaccccggacaacccttgcccgaccggcgaggttaaccgggtggtgaaaggcgtgacgatttaccgttttccttcccccgagctgtaaggagatcccatgtatctgatagccaaccgagacatgctgctcaaggcgcagcgccagggttacgccgttccggcgtttaacgtccacaatctggaaaccgtgcaggtggtggcggagaccgccgccgagctgcgctcaccggtgatcatggccggcacgcccggcaccttcagctatgccggcaccgactacctgatcggtatctgtcaggcggccgcgcaccgctacgatctgccgctggcgctgcatctggatcatcacgaagcgctggacgacatcgagcacaaggtgaaaagcggcatccgctcggtaatgatcgacggttcccatttgccgttcgagcagaatatcgccaaggtggccgccgcagtggccctgtgccatcgctacggcgccagcgtggaggccgaactgggccgcctgggcgggcaagaggacgatctgatcgtcgatacggcggacagcttctataccgatccggccgccgcgcgcgagtttgtcgccgccaccggcatcgactcactggcggtggcgatcggttccgcccacggcctgtaccacggcgaaccgaagctggacttcgaacgcctggcgctgatccgcgaacaggtggacgtgccgttggtgctgcatggcgcctccggcattccggaagcaatggtcaagcgcgcgatctcgctcggcgtttgcaaggtcaacgtcgccaccgaactgaaaatcgccttcgccgatgcggtaaaaagctacttttcgcagcacccggacgccaacgatccgcgcaaatacatcgtccccggcaagctggcgatgaaagaagtggtggcggaaaagatccgcatctgcggcagcagcggcatgctgtaatcccgctctcgcccccgttgctgcggccgcgcaacgagggcgaaaacggctgccattgcccgactttcctgagagaacgatcacagcctgttatcccgcccgcgcctgaaatcattaaccggtcttcactatgatccaaatcatggttttactcatcctacctccctattatcaaattcattgaatgctggcagtaggatttttgcccattcgtttttatttcgccagacgaaatagcttattttatgaaaacaagcgcgcttgttttttaattggcagtgtttttactctgaaaggaacagcgtatgaaccattacttagccgtattaagcgcattggtcattctgcccttcgctctgcaagcaaaaccgctttccggcagccaggtcgcctctggcgtcgtgcgcttcaccggcgccattaccacaccggcctgcaccgtcaaacatcaggatgaaaagcttatctccagctgcttcggtaaagtgacggaatatcagaacgggtatatatcctcttcgttaaaagagatgccaaaagaattagtttctgccgtcagcagtgagttggtgaataacgatccccatttaaagcgcgtgactatcagctataagtaagcacaaagcgttactgcctgctgaaataataaacaagacacaacttgtcttgatgacttataaatttattttataaatttatcgcacaataactccccgccttaccgtaagccggctgttcgggcaaccctgcggttgcccatcagcatgtccgaaatccgccatcgctccctcccagttcatgcgataatcgccacactaaactgaggagtgagccagatgcagacttttttgattgatcgtaccgccacgccggtgggagaactggtgctgattgccgatgaacaggggcgcctgcgggcgatcgactggaccgatcacgaagcgcgcctgatgaagctgctgaacacccactaccgcgccgatcggtttaccctgcgcgaacagcgcgatcccagcgggctaaccgacgccatgcagcgctatttcgccggggaactgagcattatcgatcggttgccggtgatgaccgccggcaccgagttccagcgcaccgtctggcaacagctacgccaaatcccctgtggcgagatcctgacctacggccagctggcgcaacgcatcggccgtccgaccgcctcgcgcgccgtcggcatggccaacggttcaaatccgatcagcatcgtggtgccctgccatcgagtgatcggttcgcagggcgcgctgaccggctatgccggcggcgtacagcgcaagcagtggctgctgcagcatgaaggctacctgccgaaaagtttgctgtagccgctgcgatcggcttatccagcgccattgtttggcgctgcttaataaagcacagtgcccaacgccacgctcgtgcccgcagggcactattaataacttgtgtgaataaaacgcataagtcacaaataatactcataacttcagtccgatacagaataatcggcggcatgtgtgcgcaaaattcgcacacaatacccctattcatgctaatgccacccttatcagctgcagcaaaagatgttaaaattgactcatatcaattattgaatgagcgtaatctatgatcccggaaaaacgcgtgattcgtcgtatccagtctggtggttgtgcgatccattgccaggactgcagcatcagccagctgtgcattcctttcaccctcaatgctcacgagctggaccagctcgacaacattatcgagaggaagaagcccatccagaaaggccagaccttgttcaaggccggcgacgagctgaaatcgctgtacgcgatccgttccgggaccatcaaaagctacaccatcaccgagcaaggtgatgagcaaatcaccggcttccacctggcgggcgacctggtaggcttcgacgccatcggcggcctgaagcacccgagcttcgctcaggcgctggaaacctcgatggtgtgcgagatcccgttcgagaccctcgacgatctgtccggcaaaatgccgaacctgcgtcagcaaatcatgcggttgatgagcggcgagatcaaaggcgaccaggacatgatcctgctgctgtcgaagaaaaacgccgaagagcgcctggcggcgttcgtttacaacctgtcgcgccgctttgcggagcgcggcttctcaccgcgtgagttccggttgaccatgacccgcggcgacatcggcaactaccttgggctgacggtagaaaccatcagccgcctgctgggccgcttccagaaaagcgaaatcctcagcgtgaaaggcaaatacatcaccatcgaaaacgccgacgcgctgtcggtgctggccggtacgccgcgcatcaacgtgaccgtcaacgcctgatccccccgccggatcaacatttcaccgaaattgttgatccggcacgcttccgttgttgttctgtttttcaatgttgggttactctgtaaattaacagactgttgatttcagctgtaaggaggccctatggcgaagtatcagaatcttctggtggctattgaccccaatcaggacgatcagccggcattgcgccgcgccgtatacctggtaaaacggaacggcgggcgcatcaaggccttcctgcccatctatgacttctcttacgaaatgacgaccctgctctccccggatgaaagaacggcgatgcggcaaggtgtgatcagccaacgcgccgcctggatcaacgagcagtgccgcttctatctcaacgacggcgtgccgatcgaaatcaaagtggtttggcataaccgccccttcgaagccatcattcaggaagtgctgtccggtcaacatgacctgctgctgaaaatggcgcaccagcacgaccggttggagtcggtgatctttacccccaccgactggcacctgctgcgcaaatgcccttgcccggtgtggatggtgaaagaccagccctggccggaaggcggcaaggcgctggttgcggtcaatctggccagcgaagaaccctatcacgacccgctcaatatcaaactggtgcaagaaaccgtcgaactggcgcaaaacgtcaaccagaccgaggttcacctggtcggcgcctatcccgttaccccgatcaacatcgccatcgaattgcccgacttcgacccgagcgtctacaacgacgccattcgcggccagcatctgatcgccatgaaggcgctgcggcagaaattctgcattaaggaagagttcacccacgtggaaaaaggcctgccggaagaggtcatccccgatctggccgaacatctgcaggccggcgtggtggtgctgggcaccctgggccgtaccggtatttcagccgcctttatcggcaataccgcggaacatgtgatcgatcatctgaaatgcgacctgctggtgattaaaccggaaaacttcaactgcccgatcgaagcggatgaagatgacgaacacgacgacgaagattaggcttcgctcataaagaaacgggccgctgaaaagcggcccgtttttctttggttgcccaattctacttctgcagcgcccgcagaatcgcttccacgctgtctttggcgtcgccgaacagcatctgagtgttctccttaaagaacagcgggttctgcacgccggcgtagccggtgttcatcgagcgtttgaacgcgatcacgttctgcgctttccacacttccaataccggcatgccggcgatcgggctgcgcggatcttccagcgccgccgggttcaccgtgtcgttggcgccaattaccagcactgtatcggtatccgggaaatcgtcgttgatttcatccatctccagcaccacgtcgtacggcaccttcgcttccgccagcagcacgttcatgtggcccggcaagcgccccgcgaccgggtgaatgccgaaacgcaccttcacgccgcgcgcccgcagtttttcggtgatttccgccaccggatactgcgcctgcgccaccgccatgccgtagcccggggtgatgatcaccgaggtggagttcttcagttgctcggccacttcttccgccgtggtttcacggtattcgcccatctcttcggcttcgccggtggatgaaccgtcactgccgaaaccgccggcgatcacgctgataaacgaacggttcatcgccttgcacatgatgtaagacagtatagcccccgaagagcccaccagcgcgccggtgacgatcagcagatcgttgctcagcatgaagcccgcagccgccgccgcccaccccgagtaagagttgagcatcgacaccaccaccggcatgtcggcgccgccgatcgaggcgaccagatgccagccgaacgccagcgcgatcgccgtcatcagcagcagcgctatcacctgccagcccacgctgtcggtgcgcacgaacgccaccagcaacaggaacgagatcaccaacgccgccaggttcagcttgtggcgattcggcagcatcagcggtttggaagaaatgatgccgcgcagcttgccgaaagcgacgatcgacccggtgaaggtcacggcgccgataaagatgccgaggaacacttcggtcagatggatattcgccatcaccggctccatcggcgcgccgtgatccaggtagctgttgaagccaaccagcaccgccgccaggccaacgaagctgtgcagcaccgccaccagctccggcatttcggtcatctcgaccttcttggccagatagacgccgatcgagccgccgatgatcatggcgatgatgatccagccgacgttgccggaatccggccccaagatggtggcgatcagcgcgatcgccatgccggcgacgccgaacaggttgccctgcttcgacgtttcatgacgcgacaggcccgccaggctgaaaataaacaaaatagcggcaacaatgtatgcagctgtaaccaatcctccagacatttgttaccccttagttcttgcggaacatcttcagcatgcgctgagtgacggtgaacccaccgaaaatattgatgctggcgatcagcacggcgataaaggagaggaaactcacccagccgccgtggccaatttgcagcagcgcaccgaccacgataatccctgagatcgcgttggtaaccgacatcagcggggtatgcagcgcgtggctgacgttccagaccacgtagtaaccgaccacgcaggccagcgcgaacacggtaaagtgcgacaggaactctttcggcgccgcgtccgccagccagccgaacagcaggatcgccagggccatcaggccatacttcagccacggcgaggtcggtttggcttcgggtttggcggccggtgcggcggcgggcgccgctttcggctgggccgagacctggatcggcggcgccggccaggtgatttcaccgctgcgcaccacggtaacgccgcggatcaccgtatcgtcgaaatcgatgtcaatctcaccgtttttctctttcgacagcagcttcagcaggttgaccaggttggtgccgtacagctgcgaagattgggtcggcaagcggctcggcagatcggtatagccgatgattttcacgccgttgtcggtcacggtaatggtgtcggccacggtcagttcgcagttgccgccggtttgcgccgccaaatcgacgatcacgctgcccggcttcatcgacgccaccatctctttggtgatcagcttcggcgccggtttacccgggatcagcgcggtggtgacgatgatgtcaacctccgccgcctgcgcggcgaacagcgccatctcggccttgataaaggcttcggacatcactttggcgtagccgtcgccgctgcccgcttcctcttcaaaatccagctcgaggaactccgcccccatgctctgcacctgctctttcacttccgggcgggtgtcgaaggcgcgcacgatggcgccgaggctgcccgcggcgccgatcgccgccaggccggccacgccggcgccgatgatcatcaccttggccggcggcactttgccggcggcggtgatctggccggtgaagaaacggccgaactcatgcgccgcttcgacgatcgcgcggtagccggcgatgttggccatcgagctcagcgcgtccatcgactgggcgcgcgagatgcgcggcaccgagtccatcgccagcgcggtgacgttgcgcgccgccagcttggccatcaattcggggttttgcgccggccagataaagctgaccagcgtgctgccttcgcgcatcaaggcgatctcgtcgtcttgcggcgcgttgactttcaggatcagatccgactgccacacttcgctttcgtcgaccagcgccgcgccggcggcttcgtaagcgacgtcttcaaaactggccagtttgcccgccccgcgttcaatcgcgacggtaaaacccagcttcagcagttgttccaccgttttcggcgtggctgcgacccgggcttcattggccaaccgctctcttggtacaccaatacgcataatgttcccttctcacctgtcttggatgatgtttattattttcctgcccatagcacggcgccgccggcgagcgttgcattaacttgcccgcactgatttcaggcgccaactataacctactgaaaataaggtcgatgatccataattgcttacgcattcatccctgtttttacataaaaacgccgtgcgcgatatgacaaatcgcaatttacagttaaaaaatccatacagaacagcacattctgcgtgacaggaggtttacgcccggcgtaacgatttatggccgcgcgcggcgtaaaagcataaaagttatcattttgtgaataattaacattaatgacaccaaagccgttattatggaaacttatgacggcggtgccatccgtgcgccccgcgtcgccatcggcgatttgtcgcacgggataacataaaatgctgagacagttttcagaattacatgtaataatcgacggctgaattacacttaaacagttcagtacgttataaacgttaatgcgctaggcgaaaggattttttatgaagctgaagaccacgatcatcgcgtcagccttgttatcactcaccgcgctgtctgctcatgcggcgcaagagttaactcctgagaaagcagcggcgctgaagccgtttgatcgcatcacgattaccggccgcttcaatgccatcaatgaagccgtcgacgccgtatcccgccgtgcagacaaactgggtgccgattccttctatatccaggacagcaacaacagcaacaacggcggcaactggcgcgtcaccgcagacctttatcataaagatgcgccagaagtgagcaaaacaccaaaataccgcgtatttaacggcgtgaacgaactgcctaaagaggaagcctacctgctggagccttacgataccgtgagcgtcagcggcttctaccgcagccagccggatatcaacgacgccatctccaaagaagcgaagaaaaaaggcgccgcttcgttcttcatcgtgcgccaggttgacgccaactccggcggcaaccagttcgtcaccgcctacatctataaggccgatgcgccgaaacgccgcgtgcagagcccggacgccattccagccgattctgacgccggccgcgccgccctggccgccggcggcgccgcagccgcgaaagtcgaaattcctggcgtcgcgtcttccggttcgccaagccgcgaagtgggccgtttcttcgaaacccagtcctctaccggccaacgctataccgtcacgctgcctaacggcaccaagatccaggaagtgaacaacgtgaccgccgcgcagatggtgccgttcgattccgtcaccttcaccggccacttcaacagcatgaccgatgtctccaccgaagtggcgaaacgcgcggccgagaaaggcgccaagtactaccacgtcacccgccagtggcagaacaagagcggcggcaacctgaccgtcagcgccgatctgttcaaataaaacccgtttttaggtttaccatcgggcagcccttgagctgcccgtttttattgccgctttttccatcgcgtgttgaatagttttttgtaaattccgcatattcaatcattgcatctctaatcatccctccgtagaatttgcgccaatttttagggctattgtctattcgcgcagtggttgttaatacattgttgccgccaagcagttcccttccagttgtttattctgcgttcaggatccgtcattggaaaaaaaactcggtcttaccgcgctaaccgctttggtgctcagctcgatgctgggcgccggcgtgttcagtctgccgcaaaacatggcgcaggtcgccagccccgccgcgctgttgctgggttgggggatcaccggcgtcggcattctgtttttggcattcgccatgctgttgcttacgcgtttgcgtccggatctggacggcggcatcttcacctacgccaaagaaggattcggcgaactggtgggcttctgctccgcctggggttactggctgtgcgccgtgatcgccaacgtctcgtatctggtgatcgtgttcgcggcgctgagcatttttaccgatcgcggtggcaacgttatcctcggtgacggcaatacctggcaggcgctgatcgccgaatccgccctgctgtggatcgtgcacgcgctggtgctgcgcggcgtgcaaaccgccgccagcatcaatctggcggccaccctcgccaagctgttgccgctggggatgttcgccgttctggcggcgatcgcctttaaaatggacgtgttcacactggatttcaacggtatcgccctcggcaaaccggtgtgggaacaggtcaaggacaccatgctgatcaccctgtgggtgtttatcggcgtggagggcgcggtggtggtttccgcccgcgcccgcaataagaaagacgtgggccgcgccactatgctggcggtgctgtcggcgctggcggtgtatctgatggtcaccttgctgtcgctgggcgtggtgccgcgcagcgaactggcagagatgcgcaatccgtcgatggcggtgctgatggtagaactgatcggcccgtggggagacgtgctcattgccgccggcctgatcgtttccgtgtgcggcgcctacctgagctggaccatcatggcggcggaagtgccgctgctggccgcgcagcacggcgcgtttccgcgcgtgttcggcaagcagaaccgccatcacgccccgtcctcttcgctgtggctgaccaacatcgcggtgcaactggcgctggtgctgatttggctgaccggcagcaactacaactcgctgttgaccatcgcgtcagagatgatcctggtgccttacttcctggtcggcgcgtttctgttcaaggtggcttaccgccgccgcgacaaacgcctgatcttcgccgccaccggcgcctgcgtctatggtttatggctgctgtacgcttccgggctgatgcacctgctgatgtcggtgctgctgtatgcgccgggcctgttggtgttcatgtacgcccgccgcggccatcaggatatcaatctgctgaatcgcctggaaaaaggcagcatcttactgctgctggtggccacgctgcccgccggctggtttatgctgcactaaagtgccccgtcaatgcggctgcccgtcagccgcattttgcttcctcttttcccctgctaccgcgtttcccccctttgtacagtcagccatgcgccacgcttgcgatctcaaatgcaattaattatcattatcatttattggtcaatagtaagacgcgagtgcccctggcgagaggcgtcaggcggcggatgaagacaggctgaaaatggaaggcatttcatggctgagaaactgctgcacgcattacccttgtttgccgcttgggaagcacggatcgctgagggcaacacggcattcaatcagcggcgcgatcgcctggcgatggcgcgctatcaacaggcgctggagggggctcaggcgatcatcgccgagaagccctggctgaatgcggaatataccgccagatttgaagcgctgaatattttcgagtctgcccttgccgcgctgatcgtcacgttcaacaacattacccatctgcgcctgcggcagaagcctcttcgtggcgtcgagctgcatgttcatcaggcccgagtcgctatcgagcaactgttggacgatacgtcgctgtgcgaacagatgcagcagatcgccgaacggcacctgctgcgtttcaggattgaaactctgcacttgctgcgcgaacaccggctgccggaaaccagcgtctgcgcgccggcggccaacgcttccgctaccttgcattaaaagtgacacaccaatctgagggtcatctgtaatgaatgaattgaatgacgagatgaagaagatgctggctaaacagctgcctgtgcaggcgaccagcagcccgaacggcgttcccgatatcggccccaagcgctctttgcgcctctatgatgaccgtacgctgatttacaacgaaaataccggtggccaaacgctgaaaaacatcaaggccggctcgaaaatggccgtggtgatcatcgatcgcgaggcgctggacggttaccgcttcgttggcacgcccgaactgtttctggcgggcaagccgtttgacgatgcgttgacgtttgcggaaaaaaatgggatgaagccgccgaagtacgcggtgttaattcatatagacagtatttataccctgcgctccggcccgaatgccgggacccagctctagacaccggccgtcatgcggcgtgagacatcacgttcatggttaggccatcgcggtaagtcaattgcctaaccatgaacgggcggcctggtcggtacacccggtcagcttttagggggaatggtgatggtcatgcgctcacccaccagggcgatcgcaatgccttcctcgcactctttttgaatggccgccagctgttgtgcttccagcgcatagggcaactgaatatcaaacaccgtcaggccctgctgctgcgccaggtcaatcaggcgcacgatattggtttcatcgctgacctgtgtcgacaccacttgcagcgccagctctttcaactgctctttgcgcgtttgtgacgtggtcacgcgcgatttcaacaccatgccgaagatcggcatcacaccataaatagcatcaacaaagcgccagtgcttcctgcacgatgcggacagaaaatccatatagtcgaaacagattttctcactgcgcgcgatggatgcaaggtgattgctgttcatcccctcattcctctcatggccagtgttaacccgtggtctttcaagccgccgccgggcggcaacctgaaacgcattggggatcttacatccagaaatggataatcatgcgaagctttaacgactttccgccgtatgatggcataattcccctattgtttgccagtctgtccaggagctttaatcaatggaacaccccaactctgccccggtgctgattaccggcggcgcgcggcgcatcgggctggcgctcgccagagcgtttctccagcgcggcgttcccgtcatcatcgcctatcgcagcgaatatccggcgatgaccgagttgaaagccttgggcgccagttgcattcaaggcgatttttccacgcacgaaggtatctaccgtttcgccgaccaggtgcggcaggtggcgcccaaattgcgcgcggtgatccacaacgccagcgcctggcaggccgagtcggcggaagtgccgccggagcaagtgatggcggcgatgctgcaaattcacgtctatacgccctatttgctcaaccaactgctcgaatcttgcctgaccggccagggccaggcgggcgctgacattatccatctgaccgactacgtggtggaaaaaggcagcgacaaacatatcgcctacgccgccagcaaggccgcgctggacaatatgacccgatcgttcgcccgcaagctggcgccggaggtgaaggtcaacgccatcgcgccggcgctgatcatcttcaatccgggcgacgatgaaacctaccgccaacaagcgctggcgaaatcgctgatgaaggtcgcgccgggcgagagcgaagtggtcaatctggtgaactacctgctggagagccgttacgtgaccggccgcacccacggcgtcgacggcgggcggccgctgcgctgaggcaaagatccgcatggcgcatcgctgtaggccgcgctatgctgaaatccgcttttcttattaaaacacgggcatatgcataaaattgtttttgtggaagacgatcctgaagtcggcaagctgatcgccgcctatctgggcaaacacgacatcgaggtgctgatcgaaccgcgcggcgacagcgcgcaggcgcgcattgagcgtgagcaacccgatttggtgctgctggacatcatgctgcccggcaaagacggcatgacgctgtgccgcgatctgcgccctaccttccccggcccgatcgtgctgctcacctcgctcgacagcgacatgaaccatattctgtcgctggagatgggcgccaacgactatatcctgaaaaccacgccgccggcggtgttgctggcccgcctgcgtttgcacctgcgccaacacagccagcagccgaaagaagagtcggttcagccgctcacccagcacaacgcgctgcatttcgggctgttgtgcatcgatccggtcaaccggcaggtcacgctgggcgaagaaacgatcaccctgtccacctcggatttcgatttgttgtgggaattggcgacccacgccggccagatcatggatcgtgaggcgttgctgcaaaacctgcgcggcgtaagctatgacggcatggatcgcagcatcgacgtggcgatctcccgcctgcgccgcaagctgtacgataacgcgctagaaccgttccgcatcaagaccgtgcgcaataaaggctatctgttcgcccctaacgcctgggcatcggtgcaacaatgagaaaacttttcgtccagttcttcctgttgctgttcgtctgttttctggtgatggcgatgctggttggcctggtgtacaaggtgaccgccgagcgcgccggccgccagtcgatggacgatctgatgaaaagttcgctgtacctgatgcgcagcgagctgcgcgaaatcccgttgaaggactggaacaagaccatcgccacgctggatctcaatctgtcgttcaaactgcatatcgaaccgctcggcaaacaggcgctgagcgaggatctgaaaaaacggctgcggctgggggaaatcatcgccctcgacgatcagtacacctttatgcagcgcattccgcgcagccactacgtgttagtggtcggccccattccttatctgttctacctgcaccagatgcgcctgctggatctggtattgctggtgtttatcggcatgtcgctggcgctgccggtgtttctgtggatgcggccgcactggcaagacctgctcaaattggaaaacgccgcccagcggctcggcgccgggcatctggatgagcgcacccacttcgatcccacctccagcctgagccggctcggtgtggcgttcaaccagatggccgacagcgtcaacaccctgatcgccagcaagaaacagctgatcgacggcatcgcgcacgagctgcgaacgccgctggtgcgcctgcgttaccggctcgaaatgagcgataatctgtccgaaagcgagcagcaggcgctgaaccgcgatatcggccagctggagtcgctgatcgacgagctgctgacctatgcccgtttggaccgcccgcaggttgcgttaaacattgaacccatcgatctgccaaaatggcttgaggacaaggtcgctgatatccgtcttattcatcaggaacgtgacatccagctcgatatcccacacgtcggcgacttcggcggcgtcgatctgcgcctgatggagcgcgtgctcgacaacctggtcaacaacgcgctgcgctattccgaacagcgtctgcgcgtcggcctgtggtttgacggcgacctcgcctgcttgcaggtcgaggatgacgggccgggtattccgccggaagagcgtgaacgggtgtttgaacctttcgtccgtctcgaccccagccgcgatcgcgctaccggcggctgcgggttgggactggccatcgtccattccatcgccgtcgcctaccaggggcaggtgttcgtcgaaggcagttcgctcggcggcgccagtttccgtttctgctggccggtaaagccgacattcagtttaaaagccgatctggcataatgccgccagaccttctcattggagccgaataataatgacatctgcacattccaacacgtctgcttacgatcacctgcgcgccctgttcagccggttgtcgcgtttcggccacctgtccgccatcgccggttgggacatgcaaaccatgatgccaccgggcggcagcaaggcgcgctccgaagcgctggccgagctgagcgtgctgcagcaccagattttaacggcacaaagcaccggcgcgctgttggatcgcgcgcagcaagagacgctggacgaactcgaccgcgccaacctgcgcgagatgcgccgccaatatgaagacgccgtgctgctgccggcgtcgctggtcgaggccaagtcgctcgcgggtgcgcgctgcgaacacgcctggcgcgcccagcgcccggccaacgattgggacggcttcgccgacaacctgcgcgaggtggtcaagctcagccgggaagaggcgcagatccgcgcgcaggcggccggcacaagccgttacgatgctctgctcaacctgtatgagccgggcatgcgcagcagcgatctcgaccgcatcttcggcgatctgaaaacctggctgccggatctgctgcagcgcgtggtggccaaacaagctaatgagccctgccaggcgccacaaggcccgttcaatgtggacacccagcgtcagctgagcctgagcgtgatgaaactgctcggtttcaacttcgacaatggccgtgtcgacgtcagcgcccacccgttctgcggcggcgtgccggaagatgtacgcatcactacgcgttacaacgagaaagagtttctgaccgcgctgctcggcatcgtgcacgagaccggccacgcccgctacgagcaaaacctgccgcgcgatctgctcggccagccggtcgccctggcccgttctaccgctatccacgaatcgcagagcctgctgttcgaaatgcagctggcgcgcggcaatgaattcctgaaaatcttgcgtccgttagtcaccgcgcagtttggcgaacagccggcgctggaagagaccaacttcattcgcctcaaccagcgcgttaaaccgggcctgatccgcgtcgacgccgacgaagtgagctatcctgctcacgtcatcctgcgctacgaaattgaaaaagcgctgatcgaaggcgatatcgaagtggaagacattccggcgctgtggaatgagaagatgagtgcttacctcggcctcgacaccatcggcaactaccgcaacggctgcatgcaggatattcactggaccgacggtgccttcggctacttcccgacttacaccctcggcgcgatgtacgccgcgcagctgttccacagcgtgcgtcaggccctgccttcgctgaacgaagatatcgccgccggcaacctgcagccgctgttccactggctgcagcacaacatctggcgccacggcagccgtttcccgaccgagacgctgatcgccaacgcaaccggcgaagcgctcaacccacgctatttccgtcagcatctggaaaaccgctacctgtaatctcccctggcgcggccctgccgcgcccttttcccgcctgcaagaccggataatgtttcataacgcacgttctgtgccgacatcgccttggctacagagtggcgggtggccactcaccattagtatgttgtaactaaaatagcaaaaaacgccggcattccggcctctcatcccagtgcatgacgggcgatcatcgccgccagctgcggcctcaacgaggccggcaggtcatgccccatgcccggcataatatgcaatttggcgttgacgaccgcgcgggcgatcgccactccacccgccttgcgtaccagccgatcgcgatcgccgtgaatgaccagcgtcggcgcggctatgcgccggctgtagcgacgcagatcgccgctgccgagcaacgcggaaagttgccgctgcacgccttcgggatccacgccccgcttcaacaaccgattcaccaatgcatccagctccgcctcctccggcggataaaaccgggtaccgagcgcgcgcaggaaggccttcattccctcgtggcgctgctgcagcgtcaaatcggccgccggccggcgcaccaacagccacagcagcgaaggcgccggcggtggcaacagcggctgattggtgctggagaacaagatgcataacgaggcgacgcgctgcgggtattccgcggccagcacctgggcgatcatcccccccatcgaagcgcccagtacgtgagcctgcgggatgcgtaaatgatcgagcagatgcgccgcgtccatcgccatgtccgccagggtataaggcaccggcgtttgccaaccgagctgggcgcgcagcatcagcagccacaacggctgcgtacgttgcgcctgcgttttgccggaaaggccgacgtcgcggttgtcataacggatcactcgaaacccctgagccaccagggcgcggcagaagtcgtcaggccacagcaacagctgcgcgccgatgcccatgatgagcagcagcggcggatgcgcctcatcgccccagtcctcataggccagcggcacctcgcccagttcggttacgccacaacgaatcactatctcgttcattttaaatcccttttatcgtgcctggcggtcattatagcagcaatcccctcgccgccgtcgccctgtacattaggttacatgccgaaaccaatcactcacggaaagccgggcgccgtttgcctactatcatttcaacggccccgcagtggggttgatacccaaaagtcatgttgaggattctacgatgaaaaaagtattagctctggttgttgccgctgcaatgggtctgtcttccgtggctttcgctgccgaggctgccaccaccgcacctgcggctaccgcaaccaccgccaccgctgcgccggctaaagctcaggtgaaacaccacggcaagaaagcgccggtacagaaagcgcaggcggccaagaagcatcacaaaaaagccgtgaagaaagccccggcgcaaaaagcccaggcggctaaaaagcaccacaagaaaaccagccacaaaaaagcgtaatgacgtgagggtcccctcaccgcttcaggcttgacgtgtacgacacccggttcgccgggtgttttttcatcggggggttctcattgatgctgcgccgctacctgttcgagatcgttctgaccgccctgatcctttgcggactgatcgccgtctttttttacctgtagcctgccgcgttgccggcgggaaattattgaaaaatcaattattgcccatccacatggctgctaaatcagtctatagttagcattcagtgtgtttatggatgatccgtatttgtcaggcaagagatctatgcgcatatccgttttactgttgctgtgctcactcccgctcatcgctactcaggcggcacgcgccgacggtccgtccaaggccgagcaaacgcgtctgtttttcggcaaagatgaacgaatcaaggtcacggataccgccgcccagccgtggcaagccatcggccaggtcgaaaccgccagcggcaatctgtgtaccgccacgctgatctccccgcacctggcgctgaccgccggccactgcgtgctggcgccgcccgggcaactggataaagccatcgctctgcgctttgtggcaggcgataaatcctggcagtatcaaaccggcaatatcgagaccctggtcgacagcaagctgggcaaaaagctgaagccggacggcgatggctggatcgtcccgcccgctgcggccgcttatgattttgcgctgatccggctgaaagacaaaaagccgctgccgatcgcaccgttgccgctgtggcaaggcgacagcaaggcgctgacccaggccctgaaacaggccaaacggctgatcactcaggcgggttacccggaggatcatctggatgacctctacagccaccaaaactgcaaggtcaccggctgggcccagcaaggcgtactgtcgcaccagtgtgataccctgcccggcgacagcggctcaccgctgctgttgaaaaccgccgacggctggcagctgatcgccatccaaagctcggcgccggcggcgaaagatcgctatcgcgccgataaccgcgccctggcggtgcccggcatccgcgaagcgctggacgccctggcggcgggcaactgaccctctcacaacggcgcattatgcgccgttgtgctttttcagcccccttgcatatagcgccgcggtgtggtgccggtgaactggcggaaaaaagcgataaacgcgctgtcgctggaaaatcccaaccgctgtgccaccgcgctgaccgacggcaacgacgccagcagttcgatcgcgcgcatcagccgccactgctggcaccactgctgatagctcaggccggtttcccgctgaaacagccgcgtcagcgttttggcgtgcagatgcaaacgctgcgccaacgccgccaacgccggcaactcgtcgctctccggcagcgtcgccagccaggcggcaagacgcttatcctgcggcagccgcaactgggtattctcgcgctgcgcctcgcccaactcattgatcagcaccgccagcaaatcgcgcgcctggggctgcgccaacgcatagtccagcggccagtgcgcgatgcgctcaacgatcgccgccaacagcgggtttaccgccagcaccgctgcctgtggcggcatggcggccgtcagcgccggatcgaaatacagcgagcgatacgcgacgcggccacgcagctgcacccgatgcgcaatgccgcccggtatccagacgctgcgcgtcggcggcagaatcagccactgctgcgccaacgtgaccgtcatgcatccctgcggcgcatacagcagctgcgaacgctgatgccaatgcagcccggagtcgtgctccaccagttccgccgcgatgccgagagccggtgccggcagccgatccgggtcgaacgggtgatgctgttgaatcagcgccatcagattgtcctatacctattgttttttgtccgaatgattgtaatcgaacaaaatgcgactccctatactgacgccttaacatttagggagaccctgcatcatgcaacgcttatctttaccgctgctcgtcaccgccatcatgacgccgcagatcctggaaacgctgtacagcccggcgctcaccgccatccgcagcgacttcggcatcagcgccgcgcaggccgggcagacgttatccatctatttcttcgccttcgccctcggcgtcgccttttggggagccttctgcgatcggttcggccgccgtccggcgatgctggccggcctggcgctctatctggtcggcgccggcctcgccctgctgagcggcagtttcacgctgttgctggccgcccgtgcgctgatcgccttcggcgccgcggtcggctcaatcgtcacgcaaaccatgctgcgtgatgtctatcaaggcccggcgctggggcgcatgttcgcgctggtcggcatcgcgctctccatcagcccgctgctgggaatgtttgccggcggcgcgctggtcgcctggggcggcagcgcggcgattttcaccgcgcaggcggcctgggcgctggtgctgctgctgtggagttacggcacattgccggaaacgcggccgcggcaaaccgcaacggccgccgcgccgggcattaccctggcgacgatgttgcgcgatcgtcacatctggtgttcggcgctgctggtcgccagcttcaatattatggtgttcagctacttcagcctggcgccgttcatgttcgaaaggctggggttgaacagccaacagtttggctactcgggtgtgatgctggcgctcggcagcctggcgggggcgctgttgaaccgccacctgctggcgcgcggcgtcagcgccaaacgtcagatcctgctgggcggtttgctggcggtggctagcggtatggcattgttcgggtggcaacacagcctgtggatgctgcttccctgtgcgctggtgatgctggcgttcgggttggctatcccgaatgtgctgagccaggcgctgagccgctaccggcagcaactcggcaccgccggcgcgttattcgggttgctgtactatctgttgatcggcctggggctgacgattgcggcgcgcgggcaggatttggccgccacgctgctgctgtgcggcctgttgagcctgtggtgcgccggccgcttgccggccggtgcgcccgagcttaacccgaaagctgctcgatagtttgcaaaatgcgcttgtcggagatcgggtaaggcgtgcccaactgctgcgcgaacaggctgacgcgcagctcttcgatcatccagcgcaccgccttcacctcttcctcctgctgtcgcttcggcggcagcttgttcagccactgctgccacgcctgctgtacctgctccacccgcagcatctgcgcgcgatcccgatgcggatcgatagccagtttttccaaccgccgctcgatcgcctgcaggtagcgcagcgtgtccggcaggcgtttccatccgttgccggtgacaaaaccgcggtagaccaggccgctgagctgggtcttgatatccgacagcgccagcgccaacgacatgtccacccgccccttcagccgtttgttgatgttgaagaccgccgtcaggatctgctcaacctgtttggccacctcgaccaccgtgtcgttcaactcggcgcggatctgctcctgcaggcgcgcaaagccttcctcttgccagaccgggccgccgtgttcggcgatcagcttgtcgatgccgcacgaaatgcagtcgtcgatcagctccagcaccttgccgtacgggttgaaatagagccccagtttggccttgttcggcagcttttcatgcagatatttgatcggcgaaggaatattcagcaacagcaggcggcgtgtgccctgccacatcgcctgttgctgctcgatttcgctgtcgaacaagcggatcgccacgctgtccttttcatctaccagcgccgggtaagccttcatcgaatagccgccgcgcttctgctcgtaaaaggcaggcagttgaccaaagctccagacatgcagattgctctgctccagcccatcgtcggccaccgccgacagcgtctcctgcaccttctctttcagctgcaggcgcaacgcggccaggtctttgccttcgcgcagcgtctggtttttctcgcccaccacgcggaaagtcatcttcaggtgatcgggcacctgatcccactgccaatcatcacgtgacacggtcacgccagtcatgcgccgcagttcacgctccagcgcgtccagcagcggcaactccagcgccgttacgcggccgaggaacgcttcggcgtagttcggcgccggcacaaagttgcgacgcaccggtttcggcagcgacttgatcagcgcgatcaccagctcacggcgaataccggggatctgccactcgaagccctgctcctccacctgattgaggatcggcagcgggatgtgcaccgtcacgccgtcggcgtcggtgcccggttcaaactggtagctcagccgcagcttgagattgccctgatgccagaagttcgggtagtccagcgcgctgatcttgttggcgccgtctttgatcagcatctctttttcgaagttcagcagatccggctgctgcttggcggcattcttccaccagctgtcgaaatgacggccggaaaccacgtcgttggggatgcggcgatcgtagaagccgaacagcgtttcgtcgtccaccagaatgtcgcggcggcgcgatttatgctccagctcttccacttcggcgcgcagcttctggttgtcgcggaagaaggcgtggcgcgtctgccagtccccctccaccagcgcatggcgaataaacagctcacggcacagcaatggatcgatggcgccgtaattgacctggcgcgccgcgacgatcggcaaaccgaacagcgtgaccttttcactggccatcaccgccccttgcgacttcgaccagtgcggctcgctgtagctgtgtttcaccagatgctgagccagcggctcgatccattccggttcgatgcgcgcggcgatgcgcccccacaggcggctggtttccaccagttcggccaccatggtccacttcggcggcttcttgaacaggccggagccggggaagattgagaagcgggcattgcgcgcgccggtgtattcctgcttgtccgcatccttctggccaatgtgcgacaacaagccggtcaacagcgcggtgtgcacgctgcggtagtcggaaggcgtgctgttgatcggcagccccagctctttcaccacctggcgcagctgggtatagatatcctgccactcgcgcacccgcaggtagttgaggaaatcgttgcggcacagccggcggaactggctggaagagttcgccttttgctgctcctgcagataatcccacaggttgacgaacgccaggaaatcggagtctttgtcggcgaagcggcggtgtttttcgtccgaggcctgctgcttgtccatcgggcgctcacgcggatcctgaatcgacagcgcggcggtgatgatcatcacctcgcgcacgctgccgctcttctgcgcttccagcaccatgcgcgccagacgcgggtcaatcggcaactgcgccagctgccggccttgcggcgtcagctgatagtggccgttgtcggcggtggcgatcgcccccagctcttccagcaggcgcacgccatcctgaatgttgcgtttatccggcgcttcgacgaacggaaacgcggcgatgtcgcccagccccagcgaggtcatctgcagaatgaccgacgccaggttggtgcgcagaatttccggatcggtaaacgccggccgcgacaggaagtcctgttcggaatacaagcgaatgcacaccccttccgatacgcggccgcaacgccctttacgctggttggcggaagcctgcgacaccggctcgatcggcaggcgctgcaccttggtgcggaagctgtagcggctgatgcgcgcggtgcccggatcgatgacatacttgatgcccggcaccgtcagcgaggtttccgccacgttggtggccagcacgatgcggcgaccgtggtgcgactggaacacccggttctgctcgctgttcgacaggcgcgcatacagcggcagcacttcagtgtgcggcaaattgaggcggttcagagcgtcggcggtgtcgcggatctcgcgctcgccgctcatgaagatcagaatgtcgcccggcccttcgcgcccaagctcgtccaccgcatcgaaaatcgcctgcagctggtcgcggtcggtgtcgtcgccgtcgtcgaccaccgggcggtaacgcacctccaccgggtaagtgcggccggaaacctcgatgatcggcgcattgttgaaatggcgcgagaagcgctgcggatcgatggtcgccgaggtgatgatcaccttgagatccgggcgcttaggcaacagttcgcgcaggtagccgagaataaagtcgatgttgaggctgcgctcgtgcgcttcatcgatgatcagcgtgtcgtactgcatcagcaggcgatcctgctgaatttccgccagcaagatgccgtcggtcatcagcttgaccagggtgttttccccgacctgatcgttgaagcgcaccttgtaaccgacgctgccgccgagcggggtttccagctcgtcggcgatgcggttggcgacggtgcgcgccgccaggcggcgcggctgggtgtggccgatcagccctttcaccccacgccccagctccagacagatcttcggcaactgggtggttttccccgaaccggtctccccggcgacgatcaccacctggtgatcgcggacagcgtttaaaatgtcctgctttttctgactgaccggcaggctttccggataggtaatgcgcgggcaagacgcggcgcgcgccagcactttttgccgcgccgccgcgatgtcgctttccacttcggcggcaaccgccagctgggcatcgggatttttgatttttcgtgcgccctgcaggcgacgacgtaggcgttgttgatcgcggagcatcagctcgcccagttgggccggcagtgcctcgagcggagatttcacgttcggtgttccttgtttcttcgccgccaagaccaggcttagcaacggtttaatgtttttttagcgatttttttgctttagccgcacagcctatcacaaacggctttttcgccctactttcgcgagcaaaacctcggcatgtcattcaataaaatcgaacgaagatctcgaaatattgcgctatcactgttggaggaatgtgaatagcatgtacttcatgcaagggacgctgagtcctgatgtcactgtcacaacgtaaggaattatcgatgagcaacgtattggttctgaaatcaagcatcctggcgacctactctcagtctaaccaactggccgatttcttcgtagagcaatggagcaacgcccacagcggcgacaccatcaccgtacgcgatctggccgcacagccaatcccggtgctggacggcgaactggttggcgcgctgcgtccttccgatgcgccgttgaccccgcgtcaacaagaagcgctggcgctgtcggacgagctgatcgccgagctgcaggccaatgacgtcatcgtgattgccgcaccgatgtacaacttcaacatcccgacccagctgaaaaactatttcgatctggtggcccgcgccggcgtgaccttccgctacaccgaaaacggtccggaaggcctggtgaaaaacaaacgcgccgtgatcctgaccagccgcggcggcatccataaaggcaccccaaccgacctggtagaaccttacctgcgtctgttcctgggcttcatcggcattaccgacgtggagttcgtcttcgcggaaggcatcgcctacggcccggaagtggccaccaaagcccaggaagacgccaaagcggccctgtctcaggtggttgctgcctaagaccctgcgcaggggcgccgtgcccctgccggacaaaaggcaagtcctgtcaaacctgcactaccctcataataatcatctatccgtatcatttagcgcgccagacggcgcgcttttttttatttcttcaaccattgtccgttgatgccgcgcacatactcgccgctctgcgcacgcgtcaccagcttctgccccgccatgcgcgccacttcgtcgacggcgatatggttgccgtccgccacttcctgatacttctcggcgcggccagcgttgatgcgcttcaccagcgccagcgtttccgcatcctgtttcaccggcgcaatatagccgctcagggtttcgcccacccgcccttgctgcttcgcctcatccagcgtcagcgccatcgccacgctgctgaacagccaggcggcgccggccagccacacataacgttttttcatgtcggctcctagaacagaccgctttgggttttcagcaggttttcgacgtccttatccaccttgatatgaatctcatgctcgatcttgacgttcatattgatggtgatcggatccttcggcgtcgccacctcgatgcgcggcacgcagccgctcagcagcgaaacgcacagcaccgctgccagcgccgacacactcatgattttcattgttgctccccaggttgtgagagggcctgctccagccactcctgtaaattgtcgccgaagcgcaaactgcgccacagctgaaacacgttttcctgatggcgatagttcaggatcacctcgcgtttggcgcttttctgcgggttgataccgtcgatgcgcgcgctcagcgtcagctcgcccaggttatcgagatcgacccgggcgtgcgaacggttgatttccatgtagcgcagccagtcgatcgccgcgccggtcgccaggttattgctgccgatggcgtcggccatgtctttgtccagccgcagcgtcagggtgccggcgttggcgatccagccgttttgcaccagccatttcgggtgattcaggaacagcggcagttcgccgtcgacccggccggacatggcgaactgcttcggtttcagggcggtgaacaacgcgctgagatcgaccttgtccagcttcagcaccgcggcgtcatgctgcggcaaccgcagcgccgacaggctgatatgcccgttgagcatgtccacgccgacgttgctcaacgtcagcggctgcctttcgctataaggataggtgccctgcagatcggcggaaatattctgcatctcgaacaggttggtgaaagacttgatgcgcagcgacaccggctgtttggcccccaattgccactgatgctgcttgaaccggtacgacaggataaaatccaggccgctcatctcgccgtccttcagccacatgccgccgtttttcaccacccagtgaccaccggcctcgaacccctgttcgcgagcggcggaaaacgccgactgcgcgtaaaactcgccgtcgcgcagcgtgagattgagatccggcgccagcagcggttggaacaccttcagcgactgtttcggccaccaggcttcgccgcgcagacgttcgccgtcccaacggccgcgcagcgcgatcggcccaatctgttgcgcctgcagtttgccctgcagctggaaactgtccggcgaacggccgttcacctgcagcgccagcaccggcgccggcagatagccgccgtcgctgaagctgaccttatccgccgccagctgcaactcgccgttgaactgcggactttgttcatcacgccgccagcgcagcggctgattgaggctcaggcgcggcgcggcgaccgtcaccagaccgtacttcaacttatcgaagccggtggagagtttatcgagcaccaactcactgtcgcgccaacggccgctgccggcgacgtcccaggcggcctgcagcggcggcaagcggccattgccccagtaacgccattgccagttgcccttgtccggccagaaatcctgtgcctggccgtccaggtgcagcttgaagcggccccagtaactgtcgctggcgctcaaaatcgcctgcaggcggccggtgatgccggcggcggtcaccttcacgcccgccagcggtaaacgcgcctcttccagcgtcatttccggcgtcaccttgccccacaggcgcagcagcgaaccgggctgcagcaccagcgtcgggttgagaatgctgccgccgatcacacccgggatcgacgcggtagtggaaaagtcggccagattggcctggccggtcagttggaagcgcagatcgctgtcggtcaaccccaccttgcccggcccgagggtgagcaccgcattgcccttgccgttgtgacccgcagtgatcacgttcagccgcgcgctgatctccgtttcatccagccctttgctccaatcgtgcagcgcgatgctgagcccgccgttcaacggctgctcgctgtacggccaacgccactctccctgcttgatgctgacccgctgcggcgagacttcccacggcaacaccgccagcgggcgatcgtcgcctttctcgctcaccgtcaatacgccctgctgctgttgccagcgcatgtccagcaataccggtttttccagataggcggtctgcatttccccctgcaacgcaccctgcgtcggcaggctggccagatccaacgggatggttatcttgccggcgaggtgcagcggttgtgcgctgttgggcggaaccacggtcaggctgtgcaacgtcagctgttgtttttcatccagctgcgcctcggcgctgagattcgggccccgataatgcagacgttgcccgtcggggccggaggagagctgcagcttgccggcatagcgctgccagggaatgagcgtcaggtcattaatggtgagatccagcggcggcagctgttgctgcagctgatcgagcgccagcggcgcactgttggcgtcgccgctcggcagttttgacaaacaggcgctatcgatgctgaccttatcgctcgacagctgccagcggccctggcggtaagccagccgcgtcggcccgacgttggccaacaggcaatcttgcgcagtgaaacgcgcccccgccaacgccaggccgccctggcgccagtgcaatttgccctgcaattccaggcggctccccaccggcaaccaatgcgataacacccccggcagccagcgcggcaaggtttgccacaacgccagcaccaggattgcgcagcccgccaccgtccctatgaatactttcaatcgcctggtcattaaatgattgcttcgttcctgagttaggcattggttaagtctatgcctgaattgacaataatgatggcacgaatttgacatagggtgaagccgagcgggctcgcagaagcgatttgcacctttttggcgcaaacgtgtgcggggttgtagattttcgttacatatacatcacataaacaggacagttttcagacttttgttattgttgttaccgttgatgattaatagtcttgcaaccattctaataaaagtttagctgctagctaactgtgtactagagaagccattccccacacccccgtggggatttttttgccgcctgtcgccaccgtcgtcttccctccatcgtatccagccccaccgcagccttgcagcagcgatttcggccatgtcggaacgggctaaccaattgtcgaatttactaaaatctgttaaattgatcacaaaatcacggtggagaaaccacgatgaaattggcgatatacagtaccaaacagtatgaccgtaaatacctcgaactggtgaatcagcagtttggctatgagctggaattcttcgactttttactcagtaaaaaaaccgccaaaacggccgccggttgcaaggcggtgtgcatcttcgtcaacgacgacggcagccgtgaagtgctcgaagaactggcggcactgggcgtcgaaattctcgccctgcgctgcgccggttttaataacgtcgatctggacgccgccaaagaactgggcatcaaggtggtgcgcgtgccggcctactcgccggaggccgtggcagaacacgcggtcggcatgatgatgtgcctgaaccgccgtattcaccgcgcttatcagcgtacccgcgacgccaacttctcgctggaagggctgatcggttttaacatgcacaatcgcaccgccggcgtgatcggcaccggtaaaatcggcgtggcgacgatgcgcattctgaaaggcttcggcatgaaattgctggcctacgatccgttcccgagcgaacaggcgctggaactgggcgcggagtatgtcgatctgaagacgctgtacgcgcaatccgacgtgatcaccctgcactgcccgctgacgccggagaaccaccacctgctgaatgccgacgccttcgcgatgatgaaaaacggcgtaatggtgatcaacaccagccgcggcgcgctgatcgattccaccgccgccatcgatgcgctgaagcagcaaaaaatcggcgcccttgggatggacgtctacgagaacgaacgcgatctgttctttgaggacaagtctaacgatgtgattcaggacgacgtgttccgccgcctgtcggcctgccacaacgtgctgtttaccggccatcaggctttcctgaccgaagaggcgctgaccagcatttcgcaaaccacgctgcagaacatcagccagttggatcgcggcgaaacctgcccgaaccagttgaacgcctgagcgtaacctcggggcgcccttgcggcgccctgtttatttgagagaacgcgatgagaaaaaccacggtagccgcccttgcggcgctggccttagcggggtgcagcatgaaaccacacacggccgtcacgccaggcgatctgttgcatcacaacttcgtgttgcaaagcgtggatggcgaaacggcaaaatcaccggcgggcggcggcctgctcaatctggagttcggcgagaacctgcatgtctccggcacgatgtgcaaccgctttttcggccaggggcaattacgcgacggcgtgctgacggtgaaatcgctggccaccacgcgcaagctgtgccctgatgagcagcgcaaccgctgggatcgggtgattggcaccgtgctggaaaacggcgccgaagtgacgctaaacgcacagcagctgacgctcaccggcagcggccacacgcttatttataccctgcgcgattgggtgtattgatcctgcaggccaggcgccgtgggcttacccggcgcagctgcccaggcccagcgtgcgttcctcacactgcttgccgttcggcatctggcacatgcgcagcgcttcaccgttcaagttgtgcgcgatggtggtgacgccgccgaccgccgcgcaaccggcgctggtctgcaacgtattgattctggcactgttgccctgctgtactggctcttcgttattgctgctgcaggcggctaaaagcagcacggcgctggcaagcagccattttgatgtcgtcattatcccactcctgaacccggaactgcgctgtgtaaaatcgccattgctgataacgcgcgtcacttggcggacacgtttcgctatctttgatgcaaacttgtttaatctagctcgatatataaataatgaaaatatattccagccattatttgtcgtttttttgcgccggccgaacatttattttgtttgcagaatatttccgtgacggcgccacgcgctgtcaggcgctggccgcacgcaaaaaagtgataacgtcaccgcggccatcgaggaagttttacccgcgacagcggtattaattatcttcgtgtgctttcattgcagcggcgcattttttgctaccggagagaacgatatttgtgtctatgctggcggtgctaagtaattagcattccactattttcagtgaatgatgactgaattcttcaaccggcgcgacttgctgtcacgccggctttttttacatcaaaataacactcagtgcaccgaggctttcgacagtaaattaatcaccagcacgccggcaataattaatcccatgccaacgatcgccggccaatccaatttttgctgataaacgaacaccgcggcgaccgacaccagcacaatccccatgcccgaccaaatcgcatacacgatgcccagcggcatgctcttgaccaccatcgacagcccccaaaacgccacgccgtaacccagcaccaccagcagcgacggccacaggcgggtaaagccctcagaggctttcaacatggtggtggcgatcacttccgcgactatcgccatcgtcaaatacataaatgcgctcatggttttcttctgtcaatttgccgatgcgcaattatgacgcgccggaaataaattgtctttaaacggtgaaaacaatttattgccgccggcccctaatcggcgaggaaatatgcctttgacgatttatcacccgccacacaaacgcgataaagccgcgttcgccccctctgttagacttttttccattactgcgaaagtgcgctttcgcggctttgtgagcaatgaaaaggtaacgccgatgataactacagatggtaataatgcagtcgcttccgtggcctatcgcaccaacgaagtgattgccatctaccctatcacgccaagctccaccatggcggagcaggcggacgcctggtccggcgatggccggcaaaacatctggggcgatattccgcgggtggtggaaatgcagtcggaaggcggcgcgatcgccaccgtgcacggcgccttgcaaaccggcgcgctgtcgacctcgttcacttcatcgcagggtctgctgctgatgatccccacgctgtacaaactggccggcgagctgacgccgttcgtgctgcacgtcgccgcgcgcaccgtggccacgcacgcgctgtccatcttcggcgaccattcagacgtgatggcggtgcgccaaaccggctgcgccatgctgtgtgccggcaacgtgcaggaggcgcaggacttcgcgctgatctcgcagaccgccaccctcaacgcgcgcgtgccgtttatccatttcttcgatggtttccgcacctcgcacgagatcaacaagattgtgcctctcagcgacgatacgctgcggcagatgctgccgcaggcggcgatcgacgctcaccgcagccgggcgctgtcgccggatcatccggtggtgcgcggcacctccgccaacccggacacctatttccagtcgcgcgaagccaccaacccgtggtatgacgccaccggccaacacgtgatcgacgccatggaagccttcgccgccctcaccggccgccgctatcggccgttcgactattacggccacccgcaggccgaacgcgtggtggtggtgatgggttcggccgccggcacctgcgaagaagtgatcgacaccctgctgacccgcggcgagaaagtcggcgtgctgaaggtgcggctgttccggccgttctccgcccagcatctgctcggcgcgctgccggacagcgtgcgcagcgtcgcggtgctcgatcgcaccaaagagccgggcgcgctggccgagccgctgtatctggacgtgatgaccgcgctggcggaagcctacagccggggggagcgcgccacgctgccgcgggtgatcggcggccgctacggcctgtcgtcgaaagagttcggcccggactgcgcgctggcggtgttccgcgagctggccctgccgcagccgcgaccgcgctttaccgtcggcatcttcgatgacgtcaccgggctttcgctgccgttgagcgacgaaatcctgccgcagcgcgcctcgctggaagcgctgttctacggtttgggcagcgacggctcggtctctgccaccaagaacaacatcaaaatcatcggcaacgccacgccgctgtatgcccagggttatttcgtctatgactccaaaaaggccggcggcctgacggtgtcgcacctgcgcgtcagcgagcagccgatcaattcggcctacctggtcagccacgcggacttcgtcggctgccaccagctgcagtttatcgataagtaccaaatggtcgaacgcctgaagcccggcggcaccttcctgctcaataccccttacggcgccgatgaggtctggtcgcgcctgccgcaggaggttcaggcgctgttgcaccaacgccaggcgcgtttctatatcatcaacgccgccaagctggcgcgtgaatgccggctcggcgcgcgcatcaacaccgtaatgcagatggcgttcttccacctgacgcagatcctgccgagcgacgtggcgctgcaacagctgcaggacgccatcgcccgcagctacagcagcaagggccaggagatcgtcgagcgcaactggcaggcgctgggcgccacccgcgccgcgctgaccgagatcccgctgcagccggtcgacgccagcagcccgatgcgcccgccggtggtgtcggacgccgcgccggacttcgtcaaaaccgttaccgccgcgatgctggccgggctgggcgatgcgctgccggtttccgccttcccgccggacggcacctggccggtgggcaccacccagtgggaaaagcgcaacatcgccgaagcgatcccgatctggcagcccgacctgtgcacccagtgcaaccactgcgtcgccgcctgcccgcactccgccattcgcgccaaggtggtgcagccggcggagatggaacacgcccccgcctctctgcagtcgctggatgtcaaagcgcgcgatatgcgcgggcagaaatacgtgctgcaggtagcgccggaagattgcaccggctgtaacctgtgcgtcgaggtctgcccggcgaaagatcgccagaacccggaaatcaaggccatcaatatggcgtcgcgcctcgataatctgacggcggagaaagacaactacgacttcttcctgcagctgccggaaatcgatccggcgcagctggaacgcatcgacattcgcacctcgcagctgatcacgccgctgttcgagtactctggggcctgttccggctgcggcgaaacgccgtacatcaagctgttgacccagctctatggtgaccgcttgctgatcgccaacgccaccggctgttcgtcgatctacggcggcaacctgccgaccacgccgtacaccaccaacgccgaagggcgcgggccggcgtgggccaactcgctgttcgaagacaacgccgaattcggcctgggcttccgcctgacggtcgatcaacatcgcgcgcgagtgctgcgtctgctgaacgcactggcgccgcagctgccggagcaattggtcaacgccctgcagatggaagacgtggcgccggagccgcgccgcaagcagatcgccgaactgcgcacgctgttggcgagtttcgaaggcgaagatgcgcgccagctggcggcggacgccgactacctggtggataaatcgatctggctgatcggcggtgacggctgggcctacgacatcggcttcggcggtttggatcacgtgctcagcctgacggagaacgtcaacgtgctggtgctcgacacccagtgctactccaacaccggcggccagcagtcgaaagccacgccgctgggcgcggtgaccaagttcggcgagcacggcaagcgcaaggcgcgcaaggatctgggcgtcagtatgatgatgtacggccatgtctacgtcgcgcagatttcgctgggggcgcagctcaaccagacggtgaaagcgattcaggaggccgaagcctatccgggcccgtcgctgatcatcgcctacagcccgtgcgaagagcacggctacgatctggcgctcagccacgatcagatgaaacagctgaccgccaccggcttctggccgctgtaccgcttcgatccgcgccgcagcgccgagggcaaggccgcattggcgctggattcgcgcccgccgaacagcagcctggctgaaacactgctgaacgagcagcgtttccgtcgcctgaacgcgcagcagccggaggtggccagcacgctgtatcaggccgccgagaaagagctgaaggagaagtacgatttcctcagcctgctggccggcaaggcggaaaagtccgccgctgagtaacctccctcagggcgcgagcgattcgcgccctgttcttttaccgccgacgtaaatcgcagcaacaaaacctgctggcattccggcgcgcaatccgtaccatacaggcctcgcgtcgggtgcgtggcggctggatgatgaataatgatcaaaatcggccggttgaatggtaaactcgcggtctataacgccatgcccctagtgccccccattgagaatgagcacgatttaaatgtcagaaaagcaatccgttagccaaaaagagcagtacaacctgaacaaattgcaaaagcgcctgcgccgcaacgtgggcgaagcgatcgccgatttcaatatgattgaagaaggcgaccgcatcatggtctgtctgtccggcggcaaagacagctacaccatgctggagatcctgcgcaatttgcagcaaagcgcgccggtcaacttctcgctggtggcggtgaacctcgatcagaaacagcccggcttcccggagcacattctgcccgcctatctggaaagcctgggggtggagtacaagatcgtcgaagaaaacacctacagcatcgttaaagacaagatcccggaagggaaaaccacgtgttcgctgtgttcgcgcctgcgccgcggcattctgtaccgcaccgccaccgaactgggcgccaccaagatcgctctgggccaccaccgcgacgacattctgcagacgctgttcctcaacatgttctacggcggcaagatgaaaggcatgccgcccaagctgatgagcgacgacggcaaacacgtggtcatccgcccgctggcctattgccgcgagaaagacatcgagcgtttctcgatcgccaaagcgttcccgatcattccatgcaatctgtgtggctcgcagcctaatctgcagcgccaggtgatcggcgacatgctgcgcgactgggacaagcgttacccaggccggttggaaaccatgttcagcgccatgcagaacgtggtcccttcgcacctgagcgatatcaacctgttcgatttcaaaggcattcaccacggcagcgcggtggtggacggcggcgatttggccttcgatcgcgaagacatcccgatgcagccggtcggctggcagccggaagactcggacgacgcggcgcctgcgccagagcgtttgaacgtgctggaaatcaaataagccccctcgccgcttgccatcctgcgagcggcgacatttctctttcccgacgatctcgatcctgttcacagtttgcgcaaaatttgctgggcagtgccgtttttaccctatactgtttatttatacagtcatatggagatcgcgcaatgaacatcaccccctgcctgtcccacgtctcgctgggctccaacgatttcgaggccgccgccgccttttacgatcgtgcgctggccgctttgggttgccgacgcgtgctggagcatcccggcgccattggctacggccgcgactacccggagttttggctgcaggtgccgatcgacggccggccggcctcgcccggcaatggcacgcacgtcggttttttcgctaccagtaagcaacaggtggatgaattccatcgccaggcgctgctggccggcgccgtcgatgaaggcgcgcccggttcgcggccgcattacggcgaggcttactacggctgctttgtccgtgatttggatgggcacaagattgaagccagcttctgggatgaaagcgcggcctgaagaagaaggaaatcgaataaaaaaatgccggtgattaaaccggcattgtacgaatcaaatgtgctatgcagtaattcaaaaataagaaagtaagacaattatggagcgcaacgcccatcgcttgacgttgcattcacctgcgagagagatcatgccccatttcccccggctaaatgttgatattgctcaatgttaaccgggttttcgtcatttttgcctacagccagcggctgcgcttcagccaccaagcgacgccaagcaccaatccgaccagcatcaggcaaaatgccgcgaaaccgaaaggattaccgccgcccggaataccgccaaggttgaccccgaacaacccggtcagaaaagtggtgggcagaaataccatcgccaacaatgacatggtgtaagtgcggcggttcatcgcgtcggccatcaccgtggtgatttcgtcggacaagatggcggtgcgcgcgatgctgccgtccagatcgtccaatccccgtcccaggcgatcggcgatatcctgcatgcggcgacgatcgtcatcgctcatccacggcaggcggtcgctggccagccgcgcgaagacgtcgcgctgcggcgccatgtaacggcgcagcacgatcagctgtttacggatcagcgccagctggccgcgctccggcacctgctgctccagcaaggcgtcctccagatcgataatcttgtcgtgcagatcctcgataaattcgctggtgtgatcggtcaacgcatcggaaatttccaccagccagctgccgctgttggtcggcccggcgccgctttgcagatcgttcaccacctgatcgatggaatacaccttgcggtgccgggtggagataatcagcttgtcggtgatatatacgcggatggtgaccagctgatccggccgggaattagcgttaaagttgatgctgcgcagggtgatcatggtgccttcgccctggcggctgacgcgcggccgcgagctttcgccggagagcgcttcacgcaccgagtccggcagcagcggcgtggtactcagccattcagcgctggccgggtgcgcgtaatcaagatgcagccagcaaggcgcgtcgcaggtgatcttgtcatcccgctcgatcggcgtgacgccccccttgccatccagctggtaggcgtaaaccgcatcggcgacctgcagctcgctcccctcaatcacatccattcatttatcccctcagtcttgcttatgttgctgagtctagcgttaacgctttggagatcaaaggccaagctgtaacgccagttttcccgttgtcccataaacgtgatctatacttctgccgcaaggaacgaacggagaaccgcaggagatcgccatgctaaaaacttttctggacatcgtcgtacccaccgtaggcgcctttggcgcgatgtttttcgccctcgtcaaaacgcccttccgcattcggcgggaaaaccacgataagctgctaaacctgctcgaatccgtcgagaagccccaaagcgcccccatacgcctgttgcgctttcgcgactatatcggcaacagcagcgccagcctcgctgcgctgcagctgctgttggcgttaccggacagcgtagcggcgctggaacgctatcgcttcaccggtggccgtcagcaaatcttgcgcgccacgcccgctggcttcgtgttgcggccaagcgccaataacgctttcaaacgtttcctgctttcctgccgctattttttgctgtatttggtgttcgttacgctgctggtgctgttccccgctttgactcaatgggggctgcagcagtttggggtattgattacgccccattcactccgctatctgcctaatgcacgcatcaccgacggctggcagctgctgttccccggcctattatttattatgattatgttcagcctggcattcctgaccttcaggcagttggcacgcgcgggtaacctcagttcggaacgcgccttttatcgctactatcaacgcgcgcgtgaggaacaacgatgccgggaagtcctgagacaaatgcgcacggtgctgcgccgaacctgacgaggctgcgccgtctgcgcggcatcgccatggccaccctgctgctgttcggccaatcggttcgcgcagagccggtgttagaacgtctcgccacgccctaccacgcgccgacggcggcgggttccctgccttattttgtcgctcgcgctcgatccccccagccgcgtaccgcgctggtggtgatgcacgggcatccacgcgacgccgccaagacgttgcaagcggcgatcgatgccgcgcagggagcgggagacaacagcttgctggtcgctccgctgttccaggtgccggtgaaactcgccgcccgctgccattccgccggtctgccccagccgcaagacggtgacgctctctggcgctgcggctcgtggatcgcaggcggtttggataatggcgggaaaaccggctcgttcaacgccatggataacctgctggccgatctgaaacggcgttggccgtcgctgcagtcgatcaccgtggccggtttttccgccggcgcccaattcgtgcagcattatgtcggctttgctcatccgccgagcggagtgcgtctgcgctatgtggtggccgatcccggcagctggctctattttgatcgcctgcgccctctgcccacaagctggggaagctgcggcagtgaaacaacctgtcgcttccgctggcaaacgctggacgccggccagtgtccacaggctaaccagtggaaatatggtccggaagcgcttcccgctcacctgcagcgcactgcagacgcagcccgccggcgctatgcggcggccgatatcacctatctggccgccgccgatgataccggcaccgcgccgggcgcctactatcggatactcgacaaatcctgcgccgcccagctgcagggtccctatcggctggagcgcgccccggcctatgccgactatgaccgacgttatctggcgccggacaaaccgcatcggttaacgatcgtacccggctgtgggcacaacgtcgcctgcgtctttccggctccggcggccaggcacgcgctgtttcccattaatgcaggctaataataacggcaatgaaataaacccttgccgataaatcagacaatatcaccgataaagcgctggtaatgccgttattattatgacttaacatattgctatcaattttaattcaaaatgataataataaatcaacacaaagctgtttcagcgcaaattttaggggcatatacttttctcactacgaggaggtagttatgttacgcgaccatttaaaaataagcgccagcgatacgctggaaaaaatcagcaatattcatttgcaaaaccagggccaggaagagatcagtgagttcgtggtgaaaaacgccgccggcctgcagattggcaaggtctccgtccacgatcgtttcagtacccgccgttcttatcccaccagctaccgcattactcagaccgatatgagcggccgcgtagtggtggacgccatgcgggactgtctgtaagcgtaaccgcgctctgaaatagacaatattaatgtgatgatggcaaccccgtttattattaaacggggtttgtcgcgtggaaaaattaattagcctcgtggtttcgccgccgaaaaaaataacgcccccacattgcgcgggggcgataaataaatcgactcagtgtttgatgatatacatcgtttggctataggccacgtcttccggattggtgatcgggtagccttttacccacggtttgatcaggcggccattggtgtattgatatatcggcgcgatcggcgcctgatcggcaatgatctgttccatcttgttgtaatcggcggtcaccgccgccgggttggtttcccgccccgcctgcgccagcagcttgtcgtagtccgcattcttgaacttggcgatattgccgctgtgggtggaggtcagcagcgacaggaaggtcgacgcctcgttatagtcacccacccaggaggcgcggatcacatcgaaattgccggtattgcggctgtcgatgtaagttttccactcctgattctgcagcttgacgtcaataccgagctttttcttccacatcgaggccacggcgatggcgatcttctggtggctttccgaggtgttatacagcagcgtcagcttcagcgggttgttcgggccgtaaccggccgcctgcagcaacgccttggcctgcgcgtccagctccgcctgcgattgctgttgcagcaagctcgcttccggtttgaacccggcggtcacgtccggcgtaaagtggtaggccggtttttcgccggtgcccaacactttttccgcgataatcttgcgatcgatggcgtaggacaaggcctgacgcacccgcacatcgttggtcggcgcgcgctgggtgttgaacgcgtagtaataggtgccgagctgatccggggtgtacacctgccccggaatgtctttcagcagcttctgatacatatttttcgggaaggattcggtgatgtcgatgtcacccgccaggtaacgcttggtggcgttggattcctggttgatcggcacgaaggtcactttggtcagcacggtgcgcgcatgatcccagtaatggtcgttaggcgtcagcaccagcttctcattcaccacccgctcctgcagtttgaacgcgccgttgcccaccagattgccgaccttggtccagtcgttgccgtatttttccaccaccgccttattcaccgggaacaggctgaaattggccgtcaggctgacgaagtacggcaccggcttatccagctgcaccttgagcgtgtagtcatcgggcgccgacacgcccaagcgatcggccggcagcttgccgctgatgatctgctcggcgttctggatccccgccagttgggcgaaccaggcgaacggcgacaggtttttcggctctaccagccgttgccagctgtagacgaaatccttagcagtgacagggtcaccgtttgaccagcgcgcgtctttacgcagatggaagatataagtctggttgtcgctggtctgccagcgggtggcgacgccggggatcactttgccgttggcgtcctgattgaccagcccttcgaacagatcgcgcgccagctgcgcctccggcaagcccaccgctttgatcggatcgagcgaggccggttcgtctttaatgtggcgcacgatttcctgtttgtccgccagcgcggtgcccgggggaacctgcgccgccatggcgctgctcatacaggcgccgatcgccgccgcgcagagcgccaaacgaaaaccccgttgcattttttttcccgtcattgtgatttgtcccccgttaaccatctgaattttttatcatatagcacaagatccatccggcctagcgctcacggccgagaagttgcaaaaagtgcgattcaggcgataaaaaaacccgtgcggcgcagggcggcacgggcggtgtttgcagcggcgaccgtcagtcgtacaagtggatgctgttgatgcggtagctgaactcttcgccctcttcttcatcgaacacggtgaaaaagcctttctcggccagcggacgtgccgagatatcggttttttgcagctggcgcgcatccgcgtcgtcgtaaccgtagtcgaggtagaaggcatctttctggtaatcgatatgcagggtgaacggatagttcgattcgtccccgcgcccgtcgtcgtttttcaccacgccgaaccattccccctggcggatctggttttcagcgtctacgccgcacagcagcgtgatggtgtcattttcattttcgctatagctggcgatgattctggctactggcatgttaaatcctcttgcgggtgattggcttagctctgccgttagtataacaacagcctcaggccaggtgcggtttaattggcgttttcgccgctaccgcatcacagatcgcgcaaacgccgcacaattgcgatgggaaagaagtctcaaagcgtaatacactgaataaaatgacaatgactctcggcctttaactcagggacaacaccatgaccgaacatcgaccgcgcagtgaacgtggccagttggccatcgcaggagagaactacggcagctcgctgctgggcgcaccgctgctctatttcccggcggcggtcagcggcccgcagaccgggctgatcatcgccggcacccacggcgatgagagcgccgccatcgtaaccctgtcctgcgcgctgcgcagcatcgcccccgaacagttgcgccaccacgtggtgctggcggtcaaccccgacggctgccagctggggctgcgcgccaatgccaacggcgtcgatctgaaccgcaacttcccggccgccaactggcgctccggcgacaccgtctatcgctggaacagcgcggcgccggtgcgcgacgtcaggctctccaccggcgggcgccccggctccgaaccggaaacccaggcgctgtgtcatctgatccatcgcctgaagccgcattgggtggtgtcgttccatgagccgctggcctgcattgaagatcccgccagctcgcggctcggcgtttggctgtcgcacaagttcgagctgccgctggtgaccagcgtcggttatgaaacgcccggctcgttcggcagctggtgcgcggatctgtcgctgccctgcatcaccgccgaattcccgccgatctccgccgatgccgccagcgagcgttacatcgacgcgatgaccgagctgttgacctacccggattaatccctacggggcgagctcgacgatcgccccgcattcgaacgccaggcccggttcagcgtctcgcgccagccaggtcgggccgtccagatcgacgaagcgcgccgccggcgccagcggcaaggcggcggatatcgcccgcgacgtacacaacatgcagccgagcatgatggcgaacccttgttcgcgcgcggcctgcgccagcgccaacgcctcggtcaagccgccggttttgtccagtttgatgttgaccatctggtagcgttgcgccagccgcggcagatcggcccgggtgtggcagctctcatcggcgcagatcggcagcggatggataaagtgctccagtgcggcgtcgtcaccggccggcagcggctgctccagcatcgccacgccaagatcggccagcagctggcagcgcgccgccagcccttccgcctgccaggattcattggcgtcgacgatcagcgtcgcctgcggcaccgcggcgcggatcgccaccagccgctcgctgatatagtgatcgtcgagtttgatcttcagcagcgtggcgccctgcctctccagctcacgcgcggcgaaggccatcgcttccggcgtgccgatgctgacggtctgcgccatgcggatctgcgccggcgccgtcacgccgctgcgctgccacaggctctgcccgtgcagacgacactccagatcccacagcgccgagtccaacgcgttgcgggccgcgcccgccggcatctgcgtcagcagctgctcgcgggtgatgccctgcgcgatcgccggcgccatctcagccagctgcgccatcaccgattcctcgctctcgccatagcgcggatacggcgtgcattcgccgacgccgcgcacgccctgctgttcgatttcgaccaccaccaccctggcttcggtgcggctgccgcgcgcgatcacgaaggcggtgtgcagcggccaggcttccgggtaaaaacgcatgtctctcataacggctcctgagcgaaaactgcgcatccaggcaggctgatgcgccggtgatgttttatagaacagcctaatatatacaactatttagcaaactttgatatccaatccgccccgcttgtcataaactggcgccagggtgtgaacctgatgttaacagccgtcgccggcgcgccgttccatcaggttcatcccctttgtataaacacctgtaaaaggaatctagcaatgactcagacagtacattttcaaggcaatccggtcagcgtagcgggcaaactgccacagcagggcgaacaggccaaggccttctcgctggttgccaaagacctgtcagacgtagcgctgagcagcttcgcgggtaaacgcaaagtcctgaacatcttcccaagcatcgataccggcgtctgcgcgacgtcggtgcgtaaattcaaccagttggccagcggcctggataacaccgtggtgctgtgcatctccgccgatctgccgttcgcgcagtcgcgtttctgcggcgcggaaggcctgagcaacgtggttaccctgtctaccctgcgcggcgccgagttcaagcaggcgtacggcgttgaaatcgccgaaggtccattggcaggcctgaccgcgcgtgcggtcgtggtgctggatggccaggacaacgtgctgtacagcgagctggtgaacgaaatcaccaccgagccggattacgacgcggcgctggcagcgctgaaataacaaagccggcgttcgccggctttggaaacacgctaaaggcgccgcaaggcgcctttcttattcttcgccctcggcgccgcctttacggctgctcaggccatactcgcgcagcttgttggcgatggcggtatgggaaacgcccaggcgcttcgccagcttgcgggtgctgggataggtgcgatacaggcgcgtcagcaccgagcgctcgaaacgcttgctgatgtcgtccagcgagccgtccagcacctcgtcgcccaacgacatctccacctcgaactccggcaacacgatatcctgcggccgcagttcgtagccttcggtttgcgtcagcgcgcggtagatggcgtttttcagctggcgcacgttgcccggccagccgtatttgctgaggaagccgcccagatcgtttgccagcttgggccgcgccacgccctgctcatcggcgaagcgcgccacgaacagctcggtcagcggcatgatgtcctgcggacgttcgcgcagcggcgggatggtgatggtcagcacgttgaggcgataatagaggtcttcgcggaattcgccgcgctgcaccagctcggtcaggttcttctgggtggcgcagatcacgcgcacgtcgacgtgcacctcatgctcttcgccgacccggcggaacgtgccgtcattgagaaaacgcaacagtttggtctgcatgcgcggcgacatttcgccgatctcatccagcagcaccgaaccgccgttggcctgctcgaagaagccctttttgccttccagcgcgttgggataagcgcccggcgcatggccgaacagctcgctctccaccacgtcatccggcagcgcggcgcagttcagcgccaggaacggctgcttgccgcgcgggctgcgcaggtggcaggcgcgggccagaatatccttgccggtgccggtatcgcccacgatcagcagcggcgcatcgagcatcgccagcttgcgcgcctgctccagcacgtgacgcatcttggcgctcaccgcgacgatgtggtcgaattcggtatcgtcgttcaccgacagattttgcagttggcggcccatgcgcgcggtggacttcaacatcaccaccgcgccaaccgcggccggctgttgctgttcgtcctccagatagataggcgtaatgtccatcaggaagtcctggctgcggatcaccacccgttctgagtgcggcgccgtatgctcgctctccagccagcggctgaagttatagccgccgatcagcgccccggcggtctggttgcggatcttgtcttcgctcaggctgaacagcgccagcgccgccgggttggccagctcgaccttgcccttcatatcgatagagaacaccggctccggcatcgactccagcagcgcacgcagcgcgcgatgctcgcgttcggaaggcataaagctgacggtgcgcacgtcggttacgccggcgatgcggcggatctccgccatcaacgcgcggaaagtatcgaagtccagctgggagaaattgaggtaaatgcggccgatgggatcgatctcgatgccacgtaagtcaatgctgcgcgataccaaaagatcgagtaattctcgagtgagaccgaggcggtcttcgcaaaatacttccaaacgcatcagtgttggccttatctctgcaagtgcggggatcgttagcgatgatgatactccctcgcaccgggcggtagaagcgatctgtcagcaaaagttgacagaactctgatttattgccgtggttgctgattttaaacgcaagtgaataacagcatcggcgtcattttagcctgcaaacagagagttatcacaatcataattaatttttcagagatttatcacgcaatcacagggggatcgactgtcgtcaagtctcgattacgtccggcgtcggcaccgctcagaaaacggcgctcctgagagcgccgtcgtggggttatttggccttgccgtcgccctttttcagcgtatctttcaactggccgatcagctggctgcggaaatcgccaagcttcggtttttccccttccagccacggcagcgggcggcacagttccatcgccttgatgcccagccgcgcggtcaacagcccggcgccaatgccctgcgccgcgcgcgccgacagccgcgccgccagatcctgcgacatccagtccatccccacttcgcgcaccagctcggaagcgccggcgaaggcgatattgagcagcaccagccggaacagacgaatgcggctgaagtaacccagttcgatgccgtacagcgcggcgatgcggttaatcaaacggatgttgcgccaggcgataaacgccatatccaccagcgccaacgggctgacggcaatcatcagcgtcgattcggcggcggagcggctgatttcgcgccgcgcctgattgtcgagcaccggctgcaccagtttggcgtacagctccaccacttcacgatcgttttgcgtttcatgcagcgaggcctgccagcgctgcagcgccggatgcccctgatccagcccggcctggcgcgccagcttctcgcagaattcgcgcccttgccccagcccgtggctgtgcaacagctcgcgcgccacgtcgcgctcttccgcgcgctggcgcagccgatacaaacgccgccactcagtgaccaccgaaccgacgccggcaaacacgatcaggccgccggccacgccgccgcccatggcgatccagtcctgctgcacccaggcggtatgcacccactgcacgccctgcgccaccacgctgacgccgaacagcgccagcccggcggtcaccattttgcgccacaggctgcgtttaggtttcagcgcggcgttaatgatgccttcggcgcgcccttcctcctcttcctgctgcagctccggcgccgccggaaagaagctctccgcctgctcggcgtcgaaagcgacgccggcgcgcaacgccggttcctgcggcggctgcagcggctcgtcaaaatcgatacgcggtttgatcggctcgctcatcgcaatttgtctcccaataaaaactccattaccgcatccaggcggatgtgcggcaacggggtgtccacgctcatggcgcgcgggcgaaattcatcgaagtggaacccctggctctgccagaacgccggccccggcaggcgggcgggcacttcgccggggaacaccgtcagcggcgcgccgtcgcagaggcggttgcccttcagcgccgggatacgctgcccctgatgatcgacgatgccgctctcggtcgcctgcaccgaggccaggccgacgcaatccatgctgatgccttcgaacgccgcattctgccacgcctcttgcaccagctgttgcagcaaggacaccagattggcgtgctgatcggcggtgatatggtccgctttggtggcggcgaacatcagtttgtcgatggtcggcgagaacaagcggcgaaacagcgtgcgcttgccgtaatggaagctctgcatcagttgggtcaacgccagacgcatgtcgttgaacgcctgcgggccgctgttgagcggctgcaggcagtcgaccagcacgatttgccgatcgaaacggacgaaatgctctttgtagaagttcttgacgatcgactggcagtagtaattgaagcgagcgcgcaacatgccgatgttggtatgcttgtcggcctgcgccagcttcgactcgccgatcgcggccacgtcaggccacgggaaaaactgcagcgccggcgcgccggccatgtcgcccggcagcacgaaacgccccggctgaatgaagtgcagcccttcacttttgcagcgcagcagataatcggtgtaggcctgggcgatcgccgccaggcggttttcgtcggccggcgccagcggatcgcaggttttgcataggtcaagccagggcttagcccattcggcgcgttcgccctgcagcagcccggtcatctggcgcgaccaggccaggtaatcctgttcgagcatcggcagatccagcaaccattcgccgggataatcgacgatctccaggtacagcgtggaggtgtctttaaagtggcgcagcagcgagtcgttggagcggtagcgcaacgccagacgaatttcgctgacgccgcgcgtcggcgtcggccaggccggcggcgtgccgtacagctgcgccagcccttcgtcataggtgaaacgctggatgccgagatcgcgctgcgggatgcgtttaacgcccaacaggcgttcttcgcgcaccggtgaaaacaacggcatgcgcgcgccgctgtgcacatgcagcagttggttaacgaaagcggtgataaaggcggttttgccgctgcggctcaggccggtcaccgccaggcgcagatggcgatccattccgcggttgaccagcgaggttaactcattttgcagtcgtttcattgctctccttgacgtaacgcccgaatgccttgttcaggcctttacggaacagcggttccagcaccagcgccagcacgaagcgcaccggtttgcggccgacggttttcaacagccagccggcagcgcccgccgggccatagttcaataacgctatgatgatgactttagccaatgtcttcaacattgccgccgctcctcgtttaaatccacccgttctggcggtgttcgcgacatcgattttattcatgacaatgccctccggcacaagacgattaaggttattcacgggataacggcggcgaagatgcccggcctgcgcaggccgggtctcgcaagaagggttacagcttgcggaaacggctctgtacgccgaaggtatcggacgtcacgtagcgctcgacctgacgcagctgctgctcgccgctgcccagctcatactccagctgatcgagcagctggcgcggcgtcttctgatgctcgccttcgaaacggctggccggcgcctcatccaacacgaacaccagcgcgatataggccaccagcgtgaagaagaacagcccaaagaacagcgacagcaccaccatcacgcggatcaggcgcaccggcacgtcgaaatagtgggccaaaccggcgcagacgcctttcaccatgccttcttcgggtacgcgataaagctttttactgcccagcgtattactcatcaggactgtctccagttcgggtgttccgcatcaaggatctcttccagcgcctgaatgcgttcacgcatgcgtttggcgtcttccgccagctgcgccaggcgctgcatttcttgctgactcagctggatgccagtctgttgccgattgctgtaatgcagccaaagccaaatcggcgcgacaaacagcacgaaaattgtcagcggaatggcaagtaataaagcactcattgttattccttcttatcgggtcctggattggcggccacctccggtgtgtggccgcggttcgccttactctgagcggttcatcttggctttcagcgccgccagctgctcactgatggcgtcgtcggctttcagctcggcaaactcctggtccagcgacttctttttaccgatgctgatgctttccgcttcggcttccatgtggtcgatgcggcgttcgaactgttcgaaacgcgccatcgcctcgtccagcttgccgctgtcgagctggcgacgtacttcacgggaagaagacgcggcctgatgacgcagcgccagcgcctgctgccgcgcgcgggtttcggtcagcttgttttccagctcgccgatttcgctcttcatgcgcgccagcgtttcttctacggtcgccacttcctgcgtcagcgtggcgatcaggtcggcaaccttttgtttttcgatcagcgccgcgcgggccaagtcttctttatctttgcgcagcgccagttcggctttttcctgccagtcgcttacctggctttcgccctgctcgatgcgacgcagcaactgctttttctccgccagcgcgcgcgccgacgtagaacggacttcaaccagcgtgtcttccatctcttggatcatcaaccgcaccagcttctgcggatcttccgccttgtccagcagggtgttgatgttggcgttcacgatgtcggcaaaacgagaaaaaatacccataattcacttcctcttggttctgatggcgtctgaagcgccgcgttaagtcgtacagcttgcccaaagagataatcaaaacccgtgccaacttttatgccattgaaaaacaacaactctttatttttgactctctgcgcgcttgctgtagagtgattattttcaccaaacattggcgaatttcatcatgaacgaacagccagaaaatttgttgggcgaagcaaacgcctttgtcgaagtattggagcaagtctcccaggtggcaaagctgaacaaaccggtgctggtgatcggcgaacgcggcaccggcaaagagctgatcgcccatcgtctgcactacctctccaaccgttggcaagggccgttcatctcgctcaactgtgcggcgctgaatgaaaacctgctggactccgagctgttcggccacgaggccggcgcctttaccggcgcgcagaaacgtcatctgggccgcttcgagcgcgccgacggcggcacgctgttcctcgatgagctggcgaccgcgccgatgctggtgcaggagaaattgctgcgggtgatcgaatacggccagttggaacgcgtgggcggcagccagccgctgcgggtggatgtgcgcctggtgtgcgccaccaacgacgatctgccgacgctggcggcggcgggcaagttccgtgccgacctgctggatcggctggcgttcgacgtggtgcagttgccgccgctgcggcaacgccggcccgatatcatgctgctggccgagcacttcgccattcaaatgtgccgcgagctggggctgccgctgtttcccggctttaccgaacgcgccaggcagacgttgctcgagtatggctggccaggcaacgtgcgtgaactgaaaaacgtggtggaacgttcggtctatcgtcacggcgacagcgacaacccgctggatgagatcgtcatcaacccgtttgcaccacgcgaggccacgccgcttgcgcccgcccctgaaggcgtcggcgtgttgccgtcgctgccgctcgagctgaaaaactggcagttggagcaagagaaggcgctgatcgaggcggcgctgcagcaagggcgattcaaccagcgcaaggcggcgcagttgctggggctcacctaccatcagctacgcggtatgctgaaaaagcatgcgctgctgcaaaacggcgaaacggacgaggaatagcgggcaaaaaaaaagccagcacccgagctggcttaaaaaacactggaagcaatgtgagcaatgtcgtgccttccacatcagagccgcaaactgtggccttccgtgaactgccaggcgatgataatagttatcagtatcgtctgtaaagcactttgttgagaatttttctcattaccacacgaagattgcgcaattaccactcagggaatgggtccgccatgtccagccaatagtccacgccggcggccatttcgtcgtcgttcagcaggcagtcgtccagcagacgcacgatcgccgcctgttgcaagtgctggccgataaataccagctcctggcgcatgtcgccgaacggctccacccatttctcctgaatatgcgcccgcgtttgcggatcctgcggccaattatcttgcgggatcgcgcgccaaaaggtgcccgccaggccgtaatgggcgatgccgccagcctggctccactgcccggcctgccgcggccgcgtcgccagccagaagaagcctttcgagcgcagcagcttgccgccgccccaatcgccgttgatcacgcggtagaacttgtccggcgcaaacggccgccgcgcctgatagacaaagctgctgatgccgtagctttccgtttccggcacgtgttcgccgcgcagctctttcagccagccgggcgcctgctgcgccttttcaaagctgaagctgccggtattcagcaccgcctccagcggcagtttgcccggcgcgatcggcacaatgcgggcgtcgggattcaggctggccagcagcgccatcacttcgccctgctgcgttggcgtcaacagatcggtcttgctgaccaggatcacgtcgcaaaattcaatttgctcaatcaacaggtccgccacgctgcgcagatcgtcctcacccaggctttggccggcctcctgcaggctttgcgcctgctggtattgctgaatgaaattcaccccgtcgaccaccgtcaccagcgtatccagccgggcgaattgggacaggctttcgcccgtttcatcctcaaaggtaaaggtttccgccaccggcagcggctccgagatgccactcgattcgatcaacaggtaatcgaaacgcccctcctgcgccagttcgcgcaccgacaccagcaggtcttcgcgcagcgtgcagcagatgcagccgttgctcatctccaccagcttctcttcctggcgatcgagatgcacttcattctccaccagcgcggcgtcaatgttcacttcgctcatgtcgttgacaatcaccgccacgcgcatgccctgccggttgttcaggatatggttcagcaccgtggtcttgccggcgccgagaaagccggaaagcacggtcacgggaagttgtttcatggggacctcattaaaattcattgcgtaatgcctggtaaccgcgcaccagttcgacgttggtggcggccacttcttccgaaaactgcagcgcgccgcgatcgacctggcgatagcgcgacagatcgctgtcggcgcccacgcgttcggtcgaggggatatagcggttttccggcagcgtcacgccgtccaccaccgcgttgtagcgcaccacgcagccggactgaacgtggcagttgaacagcacgctgttgaacccgataaacacccgatcgccgatgcgacacgggccgtgtacgatggcgcggtgggcgatcgagctgtaacggccgatggtgaccgccgccccgctcttggagtggatcaccacgccgtcctgaatattggagtgcgagccgatgacgatcggctccatgtcgccggcggcgttcaactcgtcggcgcggatcaccgcatacgggccgacgtaaacgaaatcttcaacgatcacccggccgcaaataatggcggtgggatcgatgtaggccagcggcgagacctgcggcagatggccgctgggatttttacgcagcatggtgttctccccgccagctcagctccgccaccgcattgtgggcatgcaggctctcctgatgctcgacgcgcagcgagaaggcgcggtagtcgcactggctgcgcagcatgcggtacaggcgccgcgccgcatcctcgcaaaacatcaggttctgaccgttggccagcgcgaaggcctgctcgtcgcggcgtttcaccagcgtttgcactggcgtgcccagcgcatgttcgatgcggtcaatcagttttaccggttcgaacgcccgttcattctcgggcgttacggtgatccaggcccagctgcgctggctgtggggcgtggccggcatgccctgctccaacagccactcgctcacctgccgttggttgacccgctccgcctcctgttcaaaatcaaactggaactgttgctgcgccagctggcggctgagcgccgccgaactcgggcaggtggaggaataaggcacgccgacggtcagcaccagcgtcagcgtgtccgtcagggtggcctcgatgcgcagcggataggctttccagccgcgctgcggcgacagcagcgccgggcgtgacagcaacagctcgccactgatcgacaagctggcgcgatcgctgtgttccggctgcgaagccaaaaaggcctgcaacgtccgaccgatgcgctgtggcgtcagctcgccctgcgtcaactcgtccagcgccagatacagccgcgacatgtgaatgccgcgttcccccgccgcttcggcgcgcaggttgataccggcgtcgaccttcgccatcaatggcttgccggccagctccagcggcagcgcgatcccttgcatcccgacccaatcgagcccgacatcactcatttcgccgcgccatgcctgagcgtccggcagcgaacggcgtggtggaagtgcaacttcgttcatacatccccttgcgttatggtgactttgccggggaacggtaacatgattttgttatattataacataacatgaaaaacttttttcttgccgctgaacgggctgattaatcaagtcgcagaaaactcagcgattttgctcaatggattgggctgctggtcagagtgcgatacactaacgctattgctgattaacccatgagcctctatgcgtggtttacccttttggatactgtcgttatgcctgacgggctctgccctggccgcgacaacaccgcccgcgcccaccgcggcgccgctaccggacattcgccaaagcggctttgtttattgcgtcagcggcatactgaataccttcaacccgcaaatggccagcagcggcctgacggtggataccttggccgcccagctgtacgatcgcctgctggacgtcgatccctacacttatcgcctgatccccgagctggcgcaaagctgggaagtgctggataacggcgccacctaccgcttccatttgcgcaaggacgtgccgttccagaccaccgcctggttcacgcccacccgcaagatgaacgccgacgacgtggtgttcagctttgcgcgcgtattcgatcagaaacacccgtatcacgacgtgaacggcggcgaatacccctatttcgacagcctgcagttcggtgattcggtgcagagcgtgagaaagctcgacgactacacggtggagattcgcctgcagtcgccggacgcctcgttcctgtggcacctggccacccactacgcgccggtgttgtccgccgaatacgccgacacgctgacgcgcgaaggccatcaggagctgatcgatcgcgagccggtcggcagcggcccgttcctgctcaacgaataccgctcggggcaatatattcgcctggcgcgcaacgccgcctactggaaagggctgccgcgcatgccgcaggtagtgatcgacctgggcgccggcggcaccggccgcctctccaagctgctgaccggcgagtgcgacgtgctggcctatccggcggccagccagctgtcgattctgcgcgacgatccgcgcctgcgcctgacgctgcgcccggggatgaacatcgcctatctggcgttcaacacccgtaaaccgccgctcgacaacctcaacgtgcgccaggcgatctcgctggcgatcaacaaccagcggttgatgcagtcgatctattacggcacggcggaaaccgccgcctcgatcctgccgcgcgcctcctgggcctatgacaacgacgcgcacgtcaccgagtacgatccggccaaatctcgcgagatgctgcggcaggccggcgtcagccagctgaacctgaagctgtgggtgccgaccgcctcgcagtcttacaacccgagcccgctgaaaaccgccgaactgatccaggccgatctcggccaggtgggcatcaacgtcaccatcgtgccggtggagggccgcttccaggaagcgcgcctgatggagatgaaccacgatctgaccctgaccggctgggccaccgacagcaacgatccggacagcttcttccggccgctgctgagctgcgcggcaatccgttcgcaaaccaactatgctcactggtgtgatccgggctttgacgaagtgctgcagaacgcgctgctgtcgcagcagctgtctcagcgcatcgacaactaccgcaaggcgcagaaaatcctcgagcagcaactgccggtgctgccgctggcgtcttccttgcgcctgcaggcctatcgttacgacatcaagggattggtgctgagcccgttcggcaacgcctcgttcgccggggtgtaccgtgaatccgcgccggaggtgaaaaagtgattatctttaccctgcgccgcattctgctgctgctgatcacgctgttcttcctgacgctggtcagcttcagcctgagctatttcacgccgcgcgcgccgctgaacggcgccgccctgctggacgcctatcagttctacttcgtcagcctgctgcactgggacttcggcgtctccagcatcaacggccaggcgatcagcgaacagctgcgcgaagtgttcccggccaccatggaactgtgcctgctggccttcgccctggcgctgttcatcggcattccgctgggcatcatcgccggcgtgctgcgcggcaagtggcaggacaccgccatcagcaccttcgcgctgctgggcttttcgatgccggtgttctggctggcgctgctgctgatgctgttcttctcgctgcatctcggctggctgccggtttccggccgtttcgatctgctgtatcaggtgaaacccatcaccggttttgcgctgatcgacgcctggctgtcggactcgccgtaccgcgccgagatgatcggcagcgccctgcgccacatgatcctgccgatcgccgcgctggcggtggcgcccaccaccgaagtggtgcggctgatgcgtatcagcaccgacgacgtgctgagccaaaactacatcaaggccgccgccacccgcggcctgtcgcgcttcaccatcattcgtcgccacgtgttgcacaacgcgctgccgccgatcgtgcccaaactggggctgcagttctccaccatgctcacgctggcgatgatcaccgaagtggtgttcagctggccgggcctcggccggtggctgatcaacgccattcgccaacaggactatgcggcgatctccgccggcgtgatggtggtcggcacgctggtgatcaccattaacgttctggccgacattctgggtgcggcaaccaacccgctgaaacataaggaatggtatgcccttcgataacgtataccgcgagaaaaagatgccgagcccgctgcgctacacctggcggattttctacggcgacgcgctggcgatgatcggtttttacggcgtgatcgccctgctgctgctgtcgctgttcggcagcctgctggcgccctacgcgctggatcagcagttcctcggctatcaactgctgccgccgtcctggtcgcgctacggcaacgtgtcgttcttcctcggcaccgacgatctcgggcgcgacatcctcagccgcctgttgaccggcaccgccgccaccttcggttccgcgctggcggtgacgctggccgcggcgttctgcggcgtgatcctcggcgtgttcgccggcgtcacccacgggctgcgctcggcggtgctcaaccatatcctcgataccctgctgtcgattccgtcgctgctgctggcgatcgtggtggtggcgtttatcggccccaaactcgaacacgccatgctggcggtgtggctggctctgctgccgcgcatggtgcgcaccatctacagcgcggtgcacgacgaactggagaaagagtacgtggtggcggcccggcttgacggcgcttccacgctgcagatcctgtggtacgcggtcatgccgaacatcgcggcggtgctggtgaccgagttcacccgcgcgctgtcgatggccattttggatatcgccgcgctcggcttcctcgatctcggcgcgcagttgccttcgccggaatggggagcgatgctcggcgattcgctcgagctggtgtacgtcgcgccctggacggtgatgctgcccggcgcggccatcctcgtcagcgtgctgctggttaacctgttgggcgacggtatgcgccgcgcaatcaatgccggggtggaataatgccgttactcgatatccgcaatttgacgattgaatttatgactgccgaagggccggtcaaggcggtcgatcgcgtcagcatgacgctgaccgagggcgaggtgcgcggcctggtgggcgaatcgggctccggcaagagcctgatcgccaaagccatctgtggcgtgaccaaagacaactggcgcgtcaccgccgatcgctttcgtttcgacgacatcgatctgctgcagctgagcccgcgcgagcggcgcaggctggtgggccacaacgtctcaatgatcttccaggagccgcagtcctgtctcgacccttccgagagcatcggccgccagctggcgcaggccatcccgggctggacctacaagggccactggtggcagcgcttcaactggcgcaaacgccgcgccatcgagttgctgcaccgcgtcggcatcaaggatcacgacgacatcatgggcagcttcccctacgagctgacggaaggcgagtgccagaaagtgatgatcgccatcgcgctggccaaccaaccgcgcctgctgatcgccgatgagccgaccaacgccatggaaccgaccacgcaggcgcagattttccgcctgttggcgcgtctcaaccagaacaacaacaccaccattctgctgatcagtcacgacctgcagatgatgagcaagtgggccgaccgggtgaacgtcttgtactgcgggcaaacggtggaaagcgcccagtgcgaagaactgctggcggcgccgcaccacccttacacccaggcgctgatccgcgccatgccggacttcggccgctcgctgccgcacaaaagccggttgaatacgctgccgggtgccattccttcgctggaacacctgccgatcggctgccgcctggggccgcgctgcccttacgcgcagaagaagtgcatcgaaacgccgcgcctgcgcccggtcaaaaaccacttcttcgcctgccacttcccgctgaacatggaggagcaataacatggaaacgctgttggaagtgcgcaacctgagcaaaacctaccgctatcgcaccgggctgttccgccgccagcacgtcgaggcggtgaaatcggtcagctttaccctgcgcgaaggccagacgctggcggtgatcggcgagaacggctccggcaaatccacgctggcgaagatgctctccggcatggtagaaccgaccgccggcgaactattgatcgacgatcatccgctggaattcggcgattatcgttaccgcagccagcgcattcgcatgatttttcaggatccgagcacctcgctcaacccgcgccagcgcatcggccagctgctggacgcgccgctgcggctgaacaccgatcttgagcccgccgagcgcgagcagcgtatcaaccagacgctgcgccaggtcggcatgctgccggatcacgcctactactatccgcacatgctggcctccgggcaaaaacagcgcgtcgcgctggcccgtgcgctgatcctgcaaccgaaggtgatcgtcgccgatgaggcgctggcctcgctggacatgtcgatgcgctcgcaaatcatcaacctgatgctggagctgcaggaaaaacacggtatttcctatatctacgtcacccagcacctcggcatgatgaagcatatcagcgaccaggtgctggtgatgcacgaaggggaaatcgtcgaacgcggcagcaccgcggaggtgttggcggcgccgctgcacgaattgaccaagcgccttatcgccagccacttcggcgaggcgctgaccgccgatgcctggcggcgcgacggcggccgcttctgagtcacaccttcacctacaaacccgctgcggcgggttttttatcgccttgcgcgcctgccgcttagcgagaaagcgcacatgcaaattacattcttgttatatatccttatattttattcctttcagttattgattagtccgtaacattattttatctcgccagggcgatcggtgaggatatcccctacgttgcacttctcatacgacaggatatcgcactgatgaacagccttcgccatcgccgccttacgcagctactgctcacgctggcagccggtttttctgtttacggccacgccctctgctgtgatgagctgcgctaaaaccgcctttcgccccgcctgcgggcatgttgcctctttgtccagccgacgctgccgcgcgcagcggcggctgttgatcatgattaaggattgaccctatggaacgactccgtcgacaacataatgcccagtggtatcacgaaacccaaagcagcgtgcggggcgatgcgccgctggaaccgcaggcggccacccttcgcgatcgctttctgctggggctgggcgccttcgccgatgaagccttaaacaatgcgctcagcgctcgcgccggcgtgttcagcgcctcgttggccggctaccacgcgctgtttcccgaccaggtgccgctgtcacgatacgtgacattgtcaccctacgatcgcctcagcaccgcgttgaccgtcgctcaggtgacgggcgtgcaatcgctttgtagccactacgccgctcgcctcgccccgctgcacagcccggacgcctcccgggaaagcaatatccgcctcgctcagatcacccaatatgcccgccagcttgccagccagcccacgttgatttgccgcaaagcgctgcaacagctcgccgacgtcgggctgagcccggcggatatcgtcaccttttcgcaaatcatcggttttgtcagctatcaggcgcgcgtggtcgcgggcgtcgcggcgttggccggccggccggcggtggtggtgcccggcttccctaacgtcgaagacgccgatggcgtcgcgttcagtgccgaagagttaagctggaccgcgcgtctgccgccaatcgacaccgaagccgccgccgccgaacagcttgacgtgctggatcagagccacccgcaggcgcgcgccgaatcttattatctgctgttggcgcacgatgccgccgcactgcgcgagcgtaacggggtgttcaacggcatcaatgccgaaggatatgggttatcgagccgcctgaaggcgctggcgacgctggcggtctcgcgcatcaacggcagccattactgcgcggccaccgtcgcgcaagaattgcaggatgagggattggttcaggcgctgttcgccgggctgcctcagggactggcgtataccgaagactcggtaaaactcgcggtgatgcgcactgccgccgagctgactcgcgcaccggagaagttcaccccgcagagcgtgcagccgttgttcaacagcggcctgaatcaggcgcaggcgctggaagtgatcctcaccgccgcgctctacgcctgggaaaatcgcctgcgccaaacgttgggcgatgcggaaccggcacaaccggcgccgtgatctgtcatcactgagttgacggctagcgtccttcgccgttaactcacccttctctgtttcggcgaaaaacttcaccaaaatataaattgataaagcaaaaatccaaacacacttcatttatcaggattatgattcgttttgttctagcatcggcgaaaaacagggttcgtcaaaattatgtctgcaaacaaagcaataggcagattgcgccatcgctcaattctgtaaccgttctcatcgcataagcagtaaaacaaggttttaaccctgctaattaatagattaactcattagcactcctaacctttcagcagtggtcgtcttgctatttcgtttctatgattaagccgatagcggcgttgtgatgcccccttttaaatattcaacaaagataaacgctcgccgttattcccattattttaattttctatcacagcaaaaaaatattgtgaggtaaccctatgtctgaacaagaacttaaatccagcaacagtatcgttaacgtgattgtcgtcatcgataccgatgccctgatagaagcattcgagaataacaaccccagccaggacgccggcaacccgacgggcattggccatcaatacgcctatatggtcgtcacctccgaacaggtgatcggcggctccggcacggcggacctgaactttaaggccaatgtcggcgatgtcattcgctggaccggcacctcggaatccgccaatttcgacgccagcgtgctgatctacgggctgccgcagttcggcagcggcacccaggttttctccaacccgaccttcaaaatgtatacccgcagctcgatgatgccggcgcaaaataccgtattccccgtcagcttcaccaaccaaacctattggtttatacaggcggacattaccaataccggcacggaaaactattgcatccaatttggcctttattatcggccaaacggcggcgatcagaaattactgggttatttctattgggatccgaccattaccatcagtaattaacatgatttcatcggccgttagagaaaacatgattatggccccgtggggccataatcatgggggaacatcggataaacttaaacgtctctattccttttgccgccgcaaccactcgctggcggcatcgaagaatttttgcgccaacggcgtggcgcgctccgccatatcaaccaccaccgccgcatggcgcggcatggcggcgatggccaccggccgccgctgcagttccggcatcagcggcgattgcaactggccgcgcgggaacaacccgcagcccaagccgacgaaaatgccctcgagcagctggaagatcgaggcagtctccagccgcgtgtgcagcgtcaacccggcgtcgcggaaatgctgatcgagatagcggcggaaataccgcgtcggctcggccaggcacagcggcaaggcggccaccgcctccagcggcaacggcgtgtcgcccaccagcttagggaagtgttgcggatgaaataccagctctacgccggtttccaccagcgattgtgattgaaaatgcagttccttcagcgtcgacagctcgaaaaagccgatgccgatgtcgacggtatgcgccgtcaacgcctccagcaattgatcggcgctcagcaccgccagccggtaatcaagatggggataacgctcgctgaccgccttgagcatttccgccaccgagatgctgcactgcggcaccacgccaaggcgcaacgtaccgtgcaaaccgtgcttgagcgactccacctccagcttcagcccttggtaaaccgagacgatctcacgcgcccacgccagcacccgctcgccttcggcggtaaaaccgccgaaatggttgccgcggttaatcagcgaaacgcccagctctttttccaggtttttcaatcgcatggacagcgtcggctggctgacgaagctggcctccgccgcccggccgaagtggcgttcccgttctaaattacacaaataaatcagttgtttaatatccatagcgcggctcaatgatcggcattcgcgctcagtataccaccgggcgtcgtcgctcgcccggtgagtcagagcttcagcttcatgtaatccatcaggcgtgagaacacgccgccctgcggcaccgcctgcagcgccaccagcggcagggttttcaccacctggccattatcgctgatgcggatctcgccaacggtttgtcctttgttgaccggcgcttccagccgcgcagcattgatcacatactgcgccttcagtttgtccgcctcgcttttcggcaggctgagcgactggtcctgcgcactgccgaccggcaagcggtggctttcgccgtaccagaccggttcttcccccaggctctggccggcgctgaacaggtgcaccgtggtaaagtcgcgcagcccccacgtcaacagcttacgcgcctgttcctcgcggcctttggaacttttgccgcccatcaccacggcgatcaggcggcgatctccttcggtggcggaggcgatgatgttgaagccggccgaggcggtgtgcccggttttcaggccgtcgacgtgcagagtcttatcccacagcaggccgttgcggttctgctgcgtgatgccgttccacgtcagcgatttctcgctgtacatgtggtattccgccggctcgctcatgatgatggcgcgcgcgatcaccgccagatcgccggcggtggtgaactgccctggcgcatccagcccgtgcaccgtctcaaaatgggtgttctgcaatcccagttgggcgctcttctcgttcatcagcttgacgaagttggcctggctgcccgccacatagtccgccatcgccacgcaggcgtcgttgccggaatcgatgatgatgccgcggctgagatcgcgcaccgtgaccctgtcaccaggcttcaggaacatcagcgaggagcctttgaacaccgggttgccctgcgcccaggcgtccttgcccaccgtaacaacatcatcgaggccaatcttatgctcatcgagcgcatgatcgatcaccaacccggtcatgagtttggtcaggctggccggattgcggcgctcgtcggcattgccggcagccagcacctggccggtagtgtaatccatcaatacgtaagaggcggcgtctatcgccggtggggtcatggtgggaaaatgggacgccgtttccgccgcctgcgcagctaaaggcagtaagataccgccgatcaccactgatactgaacgcttcacgctgtgttcctcaggcccgcaggctaaataaaatgccaatataatccgcgagatagactgcattaattcactttcaggcgaaaccattactcttttgcagcgggtgtctttatgcaaccatttgtttaggtcagcgtccgcctgcgatagatatgctctatgccgccattgccccattcgattagacgcctgcctgccgcccccctaaacttgtgacataaatacgcaagacgcataaaaaagcgtttactttttagctacaaccacctgcgaagtgtcaccatgaaattcaaaccgtcaatcaagccttataccggcccagcgggcggctggggttcgcttgaagccaccacccgctttgtcctcgacagtaaacaaaccctaaaaaacatgcgcaacctgatgcgcgtcaacaaggcgcgcggcttcgactgccccggttgcgcctggggcgacgataaccacagcaccttcagcttctgcgaaaacggcgccaaggcggtcagttgggaagcgacgcgcagcgccgtcgagcctgagttcttcgccgcccacagcgtcagcaccctgcagcagcagagcgactatttcctcgagtatcaggggcgcctcacccatccgatgcgttacaacgccgaaaccgaccactatgagcctatccattggccggacgcgctggcgctgatcgccaaacacatcaacggcatggacaacccgaaccagatcgagctgtatacctcgggccgcgccagcaacgaagcgtcgtacctttatcagctgtttggccgcatgctcggcaccagcaacttccccgactgttccaatatgtgccacgaggcgagcggcgttgggctgaaacagagcatcggcgtcggcaaaggcaccatccgcatcgatgacttcgaaaaggccgatgccatcttcgtgttcggtcaaaaccccggcaccaaccacccgcgcatgctgcacagcctgaaaaacgccgcccgacgcggcgcgcgcatcgtcagctttaacaccctgcgcgagcgtgggctggaaagattcgccgatccgcaggatccggtgcagatgctcacgccaaaatcctcgccgatcagctcttcctattaccagccgaatctgggcggcgatatggcggcggtgcgcggcatggtgaaagcgctgctggaaacccaccgtcagcgcctcgccgccggtgaaccagccttgtttgacctgacgtttatcgaacggcacagcgtcggcgtggaggcttatctggcgcaggtggacgccaccgagtggcagaccatcaccgcgcaatcgggcctgagcgaagcgcaattgcgccaggcggcggccacctaccaaggtgctgaacgggtgatctgcacctgggcgatgggcgtgactcagcataagcactctattgcgacggtgcgtgaaatcaccaacctgcagctgctgttcgggcaactgggcaaaccgggcgccggtctgtgcccggtacgcggccacagcaacgtccagggcaaccgcaccatggggatcgatgagaagtcgccgaaggcgctgctcgacagcctggaacgccactttaacttcaccgccaatcgcgcgctgggccacaacacggtggaagcgatcgaagcgatgctgcgcggcgaagtgaaagtgctgatcgcgctgggcggcaatctggccgccgcggcgccggacaccgagcgcaccgcccgcgccctgcgcaactgcgatttgacggtgcacatcagcaccaaacttaaccgcagccacctggtgaccggcaaagacgcgctgatcctgccgacgctgggccgcaccgaactggacatgcaggccagcggctcacagtacatcacggtcgaggattcgttcagcatggtgcacgcctcggaaggcatcggcaaaccgctggcggatactcaacgttcggagacggcgatcgtctgcggcatcgccgacgccgtgctgggtacgcagcagctggactggctggaactggccgatgactactcgctgatccgcgatcacatcgccgccaccattcccggcttcgaggatttcaaccggcgctgcgagcagcccggcggtttctacctgggcaatgccgccgccgaactgcgtttcgccacgccgagcggcaaggcggaattcagcgacgccgcgctgccgactaccctgttcccgcagctgggcggcgagcaagcgccgtttaccctgcagacgctgcgctcgcacgatcagtacaacaccaccatctatggtctggatgaccgctaccgcggcgtttacggtcagcgcgaagtgctgttcatccatccggaagatctggcggcgctgggcctgcaggatggcgaacgggtagagatagaaaccctgtggaacgacggcgtggtgcgtaaggtagatggattcaagctggtgagttacgacatcccgcgtggcaatctggcggcctactaccctgaaaccaacccgctggtgccgctggcaagcttcggcgacggtaccggcaccccgacctcgaagtcgattccggtggcaattcgccgcagcgagcagcaaccgtcgctgcgcatcgcctgaaaacgcgcgcccggttcacgccgggcgcgccaatatttccaggatagtctgcaattcctcggacagctgatgccgccgccagacgaaatagagatcgctcacgccctcctcgcccatttccaccaccttcagccccggcgccggcaagatcagcggcagcaacgaacccggcacgcaggcgacaccgcaaccggcctgcacgcaggctgccatcgcggcataagattccatttccagcgtcatgcgcggttttagcccgcgcgaggccagccagtgatcgaccttcagccggaacgagcactcgcggctgaacgtgtaaaactccagcggcgccagcgtggcggcgtcgggctgcccgacatccgccggcatcagcagcaccagccgttcgtcaaacgccttttggctggccagcagcggatgttcaattgggccgtcggtaatcgccagatcgagatcgctgtcgatcagcatgcgttccagcaccagcgagtcgcggctcagcacgttgatgtgcaaatgaggctgtaaacggcgcagccgggcaatgcgcgccggcaagtgactgaccagcgaaaaatccagcgcgccgaggtttaacagcccatgctgttgctcgccggcgaacagctgcttgctgcgctcggcctgcgccacgatgtcgcgcgcctgctgatagaacagtcgtcctttgggattgacgtacagccggttcttgtcgcggaaaaacagctcgccgcccagcgactcctccagctcgcgcagccgcagcgtgacgttggaaggcacgcagtgcagctcgcgggcggcggcggcaatggttttgtgttccaccacggtgcagaaaaacttcagctgactcagcttcattaatcattcacttttagttagtgttttagttaaaaacaatcactttagattagcatcgatttcatctacagtctgccgacaccctgaggaggatctctgatgccactgaatgatttattgacgctgcccggcgtggcggcccaaccggacgcggtaaccgacggttacgtgttcaaccacaccatgatccgcgtgaaagacctgaccaaagcgctggatttctatacccgcgtactgggctttacccctgtctatctggaaacgttcgaagaagccgctttcaccatctgctacctgacgcgcagcccgcgcgagcagatcccgcaggatgacgacgaacgcaaacgctgggcgctgagccaaccgggcattctcgaactaacccataaccacggcaccgaaaatcaggcggatttccactaccacaacggcaacggcgagccgcgcggctttggccacctgtgcgtcacggtgccggacgtgcgcgccgcctgtgagcggtttgaacgcctcggcgtcaccttccagaaacgcctgcacgaaggccgcatgaactacgtggcgttcattcgcgatccggacgattactggattgaaatcctgcagccgacgccgctgcgggactgattgccccctccttcaccccggccctcgcgccggggtttttcatctatcgcacttcgattgaccattcttgcgcaaaatcgcgcggcaatgcggggttccgtgacgttaggcttgctcgcagcgggtgattcgcgtaaaactgtcagccgcaaatcttgccactcacaacccattcactggacgatatgtttcaagataacccgctgctggcgcagcttaaacagcaacttcactctcagaccccgcgcgttgaaggcgtcgtgaaagggactgagaaaggctttggctttcttgaagtagacggtcaaaaaagctacttcattccaccgccgtacatgaagaaagtcatgcacggggatcgcattatcgccaccctgcacaccgagaaagagcgcgaaatcgccgagccggaaaccctggtcgagccgttcctgtcgcgctttgtcggccgcgtgcaaaagcgcgacgatcgtctgtccatcgtgcccgatcatccgttgctgaaagaggcgattccgtgccgcccggtgcgtgaactgacccacaacttccaggccggcgactgggcggtggcggaaatgcgtcgtcacccgctgaaaggcgatcgcggcttcaacgccgacctgacccagtttatcaccgacggtgaagaccatttcgccccgtggtgggtgacgctggcgcgtcacaacctggaaaaagaggcgccggagatgcaggcgctcagcgagccgaacgcggcgctggtgcgtgaagatctgaccgcgctcgaattcgtcaccatcgacagcgccagcaccgaggacatggatgatgcgctgtacgtgaccgacaacgctgacggttcgctgcagttgaccatcgccatcgccgatccgaccgcctacgtcgaacaaggcagcaaactggacgatattgcccgcgtgcgcgccttcaccaactatctgccgggcttcaacatcccgatgctgccgcgcgatctgtcggacaacctgtgctcactgcgccctaatgagcgccgccaggtgctggcttgccgcgtgaccatcgccgccgacggcgcgctgggtgacgatattcagttcttcgccgccgagatcgaatccaaagccaaactggtgtacgacgaagtctccgactggctggacggcattgccggctggcaaccgccgagcgacgccatcgcgcaacagatcaccctgctgaaacgcgtttgcgacgcgcgcaacgcctggcgccaccagcatgcgctggtattcaaagatcgcccggactaccgcttcgtgttgggtgaaaaaggcgacgtgctggagatcgtcaccgagcagcgccgcagcgccaaccgtatcgttgaagagtgcatgatcgccgccaacgtctgcgccgccatcgtgctgcgcgatcgtttgggcttcggcgtgtacaacgtgcacaccggtttcgatcccgcgctggttgagcaagcggtcaccgtattgcaggctaacggcgtggaagccgaagccgaaaaactgctgacccttgagggcttctgcgaactgcgccgccatctggatgcgcagccgacccagttcctcgacagccgcatccgccgcttccagaccttcgccgagatcagcactacgccggggccacacttcggtctggggctggaggcttacgccacctggacatcgccgatccgtaaatacggcgatatggtcaaccatcgcctgctgaaggcgatcatcaaccagcaatcggccgaaaaaccgcaggatgacgtgacggtgcagctggcggaacgccgccgcctgaaccgcatggcggaacgcgacgtcggcgactggctgtacgcccgcttcctgcaggacaaggccggtaccgatacccgcttcaacgccgagattatcgacgtgacacgcggcggcctgcgcgtgcgcctgctggacaacggcgcggttgccttcatcccggcgccgttcattcacgcggtgcgtgacgagatgcagtgcagccaggaaaccggcaccgtgcagatcaaaggcgaagtggtttaccgccagagcgataccttgcaggtcaccatcgccgaagtgcgcatggaaacccgcagcgtgatcgcccgccctgtggcctgaacgccaacctgaaacggtcgtaacgcaaaacgccggcggtgagaaccgccggcgtttttttcgccccgcgtctgctagcgcagcggatcgccgccggtttcacgcaacagcggcagcgcggccagcgagatcagcgtcgccaacatcagatagccggcgggcgccagcagcgaaccgctgagtgcgatcgactgtgaagcgatgtattgggcaaagccgccgaagattgcgacgccaaggctataaaccaacgcaaaccccagcgcgcgtacgcgctgcggaaacagctcggaaatcaccaacagcgtaggaacagaccccaacgtcgttagcccaaccatcagcgcaaccacgctcagcaacaccgccggatacggcgccaccgtcagcaaccagaaaaccggcaacgccagcagcaaaatggcgatccgcgcccagcggatcagcggcagacggccatagcgatcgcaccagcccccaaccagcaaactgccgccgaaagtgatgatcccggccagcagcatcgcggcatagccgtaagtctgcgccatgcccagatacttcaccgcaaaggtaccgagataatacatagaaatgtacgtggcaaccgtggcgccgatggtcaacatcacgccgagcaccaccgctcgcgagtgccggcgcagctgcgcaggcggctcctgagtgcgcgacatcggcggacggtcgctttccagcccgaggcgcagccagcaaccgagcggagcaagcgccacgccgataaagaaaggaatgcgccacccccattcagccatcgcgttcggttcgcccgaaagcagcggcagcgcggcgctcaaccccagcgctgtcacaccgccaatcacgctggcgataccctgcgtcgccagtgaccagctggaatagaagccgcgccgattaggcggcgccgactccaccagcaacgacatcgacgcccccacctctccacccgccgccacaccctggataaggcgcgccgccaccagcgtgatggttccccaatagccggcgctggcgtaggtcggcgcaaaaccgatcatcgccgtacccaggctcatcaacgaaatcgtcaggatcatcgccggtttgcggccgcggcgatcggcataggcgccgatcaaaataccgcccagaggccgcataataaaactgacgccgaacgtggcgaacgccagcagcaacgccagattaggatcgctcgacggcggaaagaacagcacactaatataaatgacgaagaagttataaatgccgaagtcgaaaaattccagtgcattaccgaaggaggcggcaaatatcactttcttgccacccgtcttcgacggcgcatttatttctgattgcgtcaccgccgtattttcactcattattatcttccctgttattatttttctgacttattttaaataggcttccaccagcgcgccccaataatggctgcccgccgccaggcattcatcgttaaagtcatatcccgggttatgcaccatacagcttccttcaccgtcgccattaccgatcagcagataacaaccctgcggctgcgcctcgagcatgaaggtgaaatcttcactgcccatcagcggcttggcgccgtagtgcgcgcgcgcggcgccgaactgctgctgcgccacctgatgcgcgaagcgcgtcatggcctcatcgttaaccaataccggagcgccgttgatgtggttcacgattgccgtggcaccgaagctttgcgcctgcgcctgaatcagcgcaggaatgcgcgttaacagctcggttcgccactcgcgccccagcgatcgcacgctaagccgcatttccgcgctgtccgggataacattggccgcctcaccggccttaatgctgccgacggtgatcaccgccgcctccagcggatcggtattacgcgagacgatgctttgcagcgcgacgacgatatgcgaggccaccagcaccggatcgacggtcagatgcggcatagcgccgtgcccaccgcagccttgcacggtaacgacgaattggtccgtcgaagccataaaggcgccgtgacggaagaaaaactcgcccaccggcagacccggcatgttgtgcatggcgaagatggcgtcacagggaaagcgttcgaataacccttgctccaccatcaacgcgccgccgcccagcgtctcttccgccggctgaaaaatcagatgcagcgtgccattgaagcggcgggtttgcgccaggtaacgcgcagcgccgagcaacatggtggtatggccgtcgtggccgcaaccgtgcatgcggttgggcacgctgctgctccaggatttgccgttgttttcttcgatcggcagcgcatccatatcggcgcgcagcccgaggcttttcacgccgtcacccacccgcagcgtaccgacgacgccggtgcccgccaatccgcggtgcacctcatacccccacgaactcagataatccgccaccaaatcgctggtacgaaactcctcgaagccaagctccgggtgctgatgaatatcatgacgaatggccgttagctgcggtaaataacctgcaatgactttatctatcattattaattccttttattgactttattatttgtgaaataaatgaatggcgcttcgagcgcgagccaagatatatcacgcaaaacgtttattagtaccccttgtgtcggcaatacagaaaaataatgccaaagggatcgcgcaagcgatgggtttagatattattcgccagataaaaattaaaaatgcagcaggaaacgctgccgggccacattgcgacgacagcctgcaccaatggggtttcatcacgttgtttttccaccaaaaccccacctgcttcacatttctcatccgacctgccgcggttcggcggcaaaacttctactgttaaaacgtcatccctaataacaacgtcaatttctacctctgtacgccaaggagttgtttcatgaaaaacatcaggtccggacttatctggctgctggtggcgttggtcggcgctttcgccttcgccatgctggcgctcagccgcggcgaacacgtcaacgccgtctggctggtggtcgctgccgtcgcctgctacagcatcgcctaccgcttctacagccggttcatcgccgacaaggtctttgaactggatgaccgccgtcttaccccggccgaacgccacaacgacggcctggactacgtgcccaccaacaaatgggtgctgttcggccaccacttcgccgccatcgccggcgccgggccgctggtggggccgatcctggccgcgcagatgggcttcctgccggggaccatctggatcctggtcggcgttatgttggccggcgcggtgcaggattttctggtgctgttcatctccacccgccgcgacggacgttcgctgggggagatggccaagcaagagctgggggcgttcgccggggtgattaccatgctcggcgcgctgggggtgatgatcatcatcctgtcggcgctggcgctggtggtggtgaaggcgctggccgacagcccgtgggggctgttcactatcgccgccaccatcccgatcgcgctgttcatgggcatctacatgcgctttatccggccgggcaaaatcgctgaaatctcagtgatcggcttcgtgctgatgctgctggcgatcgtttacggcggcaacgtggcgcaagatccctactgggggccgttcttcacgctgcacggcaccaccctgacctgggtgctggtgatctacggcttcgtcgcctcggtgctgccggtgtggctgctgctggcgccgcgcgactacctttcgacctttatgaagatcggcgtcatcatcggtctggccatcggcatcgtcttcgccatgccggagatgaaaatgccggcggtttcgcgctttatcgacggcagcggcccggtgttcgccggcgccctgttcccattcctgttcatcaccatcgcctgcggcgccatttccggcttccacgcgttggtttccagcggcaccacgcccaaactggtggagcgcgaaagccacattcgctttatcggttacggcgccatgctgatggagtctttcgtcgccatcatggcgctgatctgcgcctcggtgctggatccgggcgtttacttcgccatgaactcgccggcggcgctgatcggcaccacggtggaaaatgcttcgcaggtgattaacagctggggctttatcgtcacaccggaaacgctggcgctgatcgccaaagaggtaggtgagaactccattctgtcgcgcgccggcggcgccccgaccttcgccgtgggtatggcgcacatcatcagcgaggtgttcaacagccgggcgatgatggcgttctggtatcacttcgccattctgttcgaagcgctgttcatcctgaccgccgtcgacgccggtacccgcgcctgccgctttatggtgcaggatctggtgggcgtggcggtgccgcagctggccaacaaccgctcctggttcggaaacctggcgggcaccacggtggcggtggccggctggggcttcttcgtgtatcagggggtggtcgatccgctcggcggcatcaataccctgtggccactgttcggcatcggcaaccagatgctggcgtcgatggcgctgatcctcggcaccgtggtgctgttcaagatgaaaaagcagcgctacgcctgggtcaccattctgccgaccgcctggctgttcgtgacctccatgaccgccggctggcagaagatcttccatgagaaaccgagcatcggtttcctggcgcaggcgaagaaattctctaccggcatcgagcaaggcacgatcattgcgccggccaagtcgctgaaggacatggagaccatcgtgttcagcaaccagatcaacgccgcgctgtgcgggttctttatgctggtggcggtgaccatgctgatcgccgccttcttcgcgatccgccgggcgctgcgttccgaacaaccgacggcgcacgaggtcagcgccgcgcttagggaagaggccagccgcagctaaacgaaccgagcatcaagcaagggcgccgcggcgcccttttttactggctttagcctaacagcgtcgagccgaacgccccctgccaatcctgttcgaatttctcgaccgcggcctgcaccgccggcgcgttcaggaactgctccgcgacgtccaccggcagcgtgatggcctgacagcccgcgagcaagcactccagcgcctggcgcggcgttttgaagctggcggccagcacctgcgccgacggcgcatgcaggctcaacagctgctgcagctcgtgcaccatttcgatgccgtcgccgccctgcgcgtccacgcggttgacataaggcgccacatattccgccccggccaatgccgccaacagcccttgcccggcgccgtacactgcggtgcccagcgtcggaatggacatcgttttaagcttcttgatcgccgccaacccttcggcggtcgccgggatcttcactaccagccccggtacccgctggctgagcagcgccgcctccgccaccatacgttccgcatcggccgccatcacctgcgcaaacagcttgccggtaccgccgagggcgtcgcgcagcgcgggcagcacttcccagatcggcttgccttccttcgccacgatgctcgggttggtggtgacgccgtgcagcggcagaatgcgcgccaggcgttttaccgcggtcacatcggcggtatcgagataaagctccatcacggactcctgtgtcatgttctgtgggcggattcaaactctgatcatcatagggcaaaaaaaccgccaacctttgatcaaaatcaattcgactttcattcgaaacacctttaatggcgaaagattcagcaacgccaaacgggtgactcatgttctttaatctgcagcgctactcgacccatgacggccccggcatccgcagcgtggtctttttaaaaggctgcccgctgagctgccgctggtgtcagaacccggaaagccgttcgcgccacgcagacctgctgtttgacgagcgcctgtgcctgagcggctgcacgctgtgcgccgcgcgctgcccacaaggcctgcaacgtgacgaggaggcattgacgctgcggcgtgaagtcatcagcgcagacgactacgcagccctggccgccacctgcccgaccggcgcgctcagcctgtgcggcagctcggtcaaccccgacgatatcatggccgaggtgatgcgggataagcctttctacctgcgcagcggcggcggtttaacgctgtccggcggcgagccctttatgcagccggagatcgcggcggaactgctgcggcgcggccgcgaggccggcatccacaccgccgtcgagtcctgtctgcacgtgccgtggcgttacatcgcgccttcattgccgtggctggatctgctgctggccgatctcaaacacaccgacgaagcgcgcttcagagcctggaccggcggctccgcccgccgggtgatgaacaatttccgccggctggcggcgcacggcgtgccaatgaccgtgcgcgtgccgctgatccccgatttcaacgccgatcgccgctctgtccgcgcgatcgtcgacttcaccgccgacgagatcggcgtgtcggagatccactttctgccgtaccacacgctgggcatcaacaagtaccacctgctcggcgagccctaccgtgccgcccgcacgccgctggacgcgcccgctctgctggccttcgccgaagactatgccggcgccaaaggcctgaccgccattttgcgaggataacgccatgaccacgttggatttgaccaccctcagcgcccgcattcaggcgcacaagaacgcgctgattcacatcgtcaaaccgccggtgtgcaccgaacgcgcgcagcactataccgaagcctatcaacagcatcaggacaggccgctgccggtgcgccgcgcgctggcgctggccaaccacctggcgaaacgcagcatctggatcgccaacgacgagttgatcgtcggcaaccaggccagcgaactgcgcgccgcgccgatcttcccggaatacaccgtcggctggatagaaaacgaaatagaccagttggccgaccggccgggcgccggtttttcggtcagcgaagagaacaaggcgattttgcatcgtctgtgcccctggtggcgcggccaaacggtgcaggatcgctgctacggcatgttcaccgacgagcaaaaggcgctgctggccaccggcatcatcaaggccgagggcaacatgacctccggcgatgctcacctggcggtcaacttcccgctgttgctggagctaggtctcgacggcctgcgtgaaaaagtgaacgcgcgccgcagccgcctgcgcctgaccgagtgggaagatctgcacaaagcgcagtttctcaacgctatcgacatcgtgctggcggcgctgagcgaacacatcctgcgcttcgcccgcctggcgcgcgacatggcgcaaaacgaaccgcgcactggccggcgcaccgagctgctggccatcgcggataactgtgaacagatcgcccatcgcccgccgcacaccttctggcaggcgctgcagctgtgctatttcatccagctgacgttgcagatcgaatccaacggccattcggtttccttcggccgcctcgatcaatacctctatccctggtatcggcgtgacgtggagctggagcaaaagctggcgcgggaagacgccatcgagctgttgcacagctgctggctaaagctgctggaggtcaacaagatccgctccggctcgcattccaaggcttccgccggcagcccgctgtaccagaacgtcaccatcggcggacagaagctggtcgacggccggccgtgcgatgcggtcaacccgctgtcctacgccattctcgagtcctgtggccgcctgcgctccacccagcccaacctcagcgtgcgttaccatgccgggatgagcgccgacttcctcgacgcctgcgtgcaggtgatccgctgcggtttcggcatgccggcattcaacaacgacgaaatcgtcattcccgaattcatcaaactgggggttgagccgcaagacgcctacgactacgccgccatcggctgcatcgagaccgccgtcggcggcaaatggggctatcgctgcaccggcatgagcttcatcaacttcgcccgcgtgctgctggcggcgctggaacagggccgcgacgcgacctccgggcagatcttcctgccgcaggaacaggcgctatccaaaggaaacttcgccgatttcgagcaggtcttagccgcctgggatcggcaaatccgctactacacgcgcaagtcgatcgagatcgaatgcgtggtggacagcgtgctggaagaaaatgcccacgatatcctctgttccgcgctggtggatgactgcatcgagcgcggtaaaagcatcaagcaaggcggcgccaaatacgattgggtttccggcctgcaggtcggcatcgccaacctgggcaacagcctcgcggcggtgcgcaaactggtgtttgaccagggggcgatcggccagcagcagttggcgacggcgctggccgaagacttcgccgggctggatggcgagcagctgcgccagcggctgctcaacgccgcgcccaaatacggcaacgacgtggacgaggtcgatcggctgctggtgcgcgcctaccaaacctatatcgaagaactgaagcagtatcgcaacacccgcttcggccgcgggccgatcggcggcggttactacgccggcacctcgtcgatctcggccaacgtgcccttcggcgccgccactctggccacgcccgatggacgtaaggcgcacacgccactggcggaaggcgccagtccggcgtccggtaccgatcacctggggccgacggcggtgttcaattcgctcgccaagttgccgaccgaggcgatcctcggcggcgtgctgctcaatcaaaagctgaacccggcgacgctggacaacccgcgcgaccgggaaaagctgatgctgatgttgcgcaccttcttcgagagctaccgcggctggcatgtgcagtacaacatcgtgtcgcgcgaaacgctgctggcggcgaagcaacaccctgaccaatatcgtgatttagtggttcgcgtagctggctattccgccttctttaccgcattatcccctgaggcgcaggatgatattattgcgcgcacagaacatactctttaaacctttgactcttagcggccgcgccttggcggccgcatcatcaggccgatatgaatttacgacaacagaccatattgcagttggttaacgatcgccggcggatcagcgtcaatgagctggcgcgcgcctcgggcgtctcggaagtcactatccggcaggatctcaacctgctggaaaagcgcagttatctgaagcgggtgcacggttccgccgtggcgttggagagcgacgacgtcgacgcccgcatgatgtccaatttcaccctcaagcagcggctggcgcaatacgccgccgcgcaggtcaacgacggcgagacgatctttatcgagagcggcagcgccaacgccctgctggcgcgctacatcgccgaacgcaagcgcattacgctgatcaccgtcagccactacatcgccaacctgctgaaagaaaccgactgcgacgtgattgtgctgggcggcatgtaccagaagaaaagcgagaccgtggtcggcccgctgacgcggctgtgcattcagcaggtgcatttcaataaggcgtttatcggcattgacggctttcaggccgaaaccggctttaccggccgcgacatgatgcgcgccgatgtggtcagcgcggtactggccaagggcgtggagaatatcgtgctgacggactccagcaaattcggccagatccagcccaatccgctggcgcagccggggcaaatcagccgggtgatcaccgattcacgtttggcgctggagtatcagcatcagctgaaacgccagggcgtacaggtggagctggtcaacgaataacgcgccgcgcgggccacgccgcccgccgtttcccttgcgcagcgggattttaagactatttacctgtttatccttcccgagaaacctatactcagcttcggtaacttttgggccgtaacccgctaattattcggccgttaacaaaaaatgccattttttatatcgataccgtatgggaatcaacagcaggcctgatttatggttaacgcctatacttataaggcacttccatatagccaatgctaaggagaagtcattatgatgattatcaataaacgtttcgccaccgccgctctggctctgactctggcgttttcactgagcgcctgttccaacatgtccaaacgcgatcgcaacaccgccatcggcgccggcgccggtgcagtcggcggcgcagtgctgaccaacggcagcgctttgggcacgctgggtggggcagcggtgggcggcatcatcggtcaccaggttggcaaataacctgcccgatgttcctccgccgacaggcgggcaaaagcgacttggcgctttgacgtattaaccaataacgatgatttcaggtctgttttacgttaagtctatggttctttcgccgttaacgggttaacccccggcagcaacaacctctagccatgccgcagcattgcaccgcggcatggcgattcacctcaaccgcccgccagtttgaccttcatgcctttggcttccagcagctgtttgagcagatcgcgtttatcgccctggatctcgatgaccccgtctttcaccgagccgccgcagccgcatttctttttcagctcggccgccagtttatcgagcgcggcatcatccagatcgacgccggtaatcaggcacacgcccttccccttgcggccgctggtctggcgctggatgcgcacaacgccatcgcccttggcgcgttgcggtttaacctcttcctgcttgatgcgaccggtgtccgtggaatacaccagacgactgttatcgtcattcatcatcgcttcctcaggccaaagaggcgcggatcgcgcgcagcgtcgcggccggatcggcagattgggtgatcggacgcccaatcaccatatagtccacgccggcggcctgcgcctgcaccggcgtcatgatacggcgctgatcgcccgccgcgctgccttcagggcggatccccggcgtaaccagttggaaagcctgcccgcaggccgccttaagccgctgcgcttcgtgtgccgaacacaccacgccgtccagcccgcagtcgcgggtcaggcgcgccaggcgctcggcgtgctccgccgggctggcctcgatgccgatgccgcgcaggtcttccgcttccatgctggtcagcacggttacggcgatcaacagcggcgcatccgtcccgaatgacgccagcgcttctttagcggcagtcatcatgcgcgcgccgccgctggcgtggacgttaaccatccaaacgcccagttcggccgccgccgctaccgcatgcgcagtggtattgggaatatcgtggaatttcaggtcgagaaacacgtcgaaaccgcgcccatgcagatcgcgcaccagctgcggcccaaacagcgtgaacatttctttgcccactttcagccggcagtcttgcggatcgatacggtcggcgaacgccagcgcagcgttcttatcggcgtaatctaacgccacaacgattggagatgattttaagtcattgttattagcgttattttcagacttcatttcttctaccttttgtaaaatggagataatcagggactcacccgcgaaactgaccgccgcattctacatgtcgggggcccgaaatcccagccgcagcgcgcacctacgctctgtcatgttacctcccgcctttgtcatggcgcgtcaatgaacgcccgtcagcaataaaccacgcagcgtaaaacgccgtaaagatgcgtaaattgttaatcagatattttgaatgacttgctcagcattatcagattttcaatcggcacggatgctttattattcaccacatcggaagcgaacggcttccttcctaaataaacagactggagtcacccatgaaaaccatcaaatattttgcagccgcagccgctatcgcactgacctctttcgccaccttcgccgctgaaccgatcagcagccagcaggccgataacctgaccgccaccggcatcgtttccgcaggccacgcgaccaccctcagcagcctggagaaaaagctggccgctaaagcggatgcccagggcgccagcagctaccgcatcatctccgccggcggtaacaacatgctgagcggcaccgcgatcatctacaaataatgtttccggtacagggcccgcatgctcgggccctgcctctgtttcccgcctaaaaaacccgcatttgtcccgcctccgtttgttacataaatattaaatttttattacacactagacacccgatcgccagtggcttagcttgaaggcatcttcctgcagaaaggctttcaaaatgagcgagatatcgacacttaccattaaaattcctctggaactgaaggaaaaaatccgcgccgccgccgctgaaaacgaattttcgttgagcgtggaagtgtgccagcgcctggaaagcagtttcagcgcgcccgccaccaaagcagagaaaccggccaaaaaggcggatgagctgcaccacggcgaaatcgacaatcaaagcaccgaagaagagattgaacagccgctgagccagaaagagctgaagaaactgcgtcagctgttgaaaaccggcgccaaaggcggcaagaaaaagtaagtgatgaacataaaaaaacggggcgattttcgccccgttttttttgccgctccgccgcgttattgcccgtccagaccgcgtatcggtttgaccgatgaccaggcgcggcacgacgggcaatgccaatagagcgagtgcgcggtgaagccacatttgtggcagcggtaacgcggtttggtgcgaatttgctcgccgaccatatcgcgcaacagcagcagactctctttcgcacggccgtcttcagcgtccgccaggtgataatccatcagccgataaaacacccgcatagtgggatgacgctgcagctgacggttgatatagacctgcaccacgtcgcgcccttcgtgctgctcgatgatctcggctagcatcagatcggcagtggcgccggtgttctcttccacgcagcgcttaagaaaatcggcccagttgtgctgttgttccggcagatgcgtgtagcattcctgcagcatcggcagcgtttcgctgaccaactctttatcctggctcagtacgcgttgcagcgactctgccgctttggcgtagtcgttttgcgccatgtagatgcgcccgaacatgatggacacgcgcgcacactgtttatcggcggcgtccgcgcgcttgagcaggctcattgcccgatcgagatcgtcgctgcccattgcctgcagcgccaactcacagtaaaagtgcgcgatctcgacgcgttgcttctctttgcccagcttgaccagtttttccgccacgtcgatcgctttctgccagtcgctggtcgcctgatggatcaccagcagttgctgcagcgccgagacgcgaaaatccgcttcgtcagtcaactggctgaacatgtcttccgcgcggtcgtacagcccggccgccatatagtcgcggcccagctgctgcaccgccagcaggcgctgttcgaaggtcagggaggcgctttccatcaaggcctgatggatgcggatggcgcggtcgacttcaccgcgcgaacggaacaggttacccagcgtcaggtgggcttcaacggtgttgctgtcctctttcaacatgtcgaggaacagatcgaccgccttgtcctgctggttggagagcagaaagttcacccctgccacgtattcgcgcgacaggcggttggcttcttgctgtttatcctgctgagcgcttctgcgccccatgtaccaaccgtacgcggcagccacgggcagcaacagaaacagcagttctaacatagaggattattccttgctgacaacaggctgagccgccggttcagcgggctgctcaagctgcagctccagccttttgatcttgcgctcggcgcgacccagcgcaatacgcgtgcgcaggtagaacaggccgcaaatgatccagccgagaacgaaaccggcaccaaacagcgtggccaacagggtcgatacgcgatagtcgccctgcgcaaccagatagttaaaattgaccacctgatcgttatgcgcacccaaggtgacggaaatcacgaagatcaccagaaccaacaaaaaaatcagcaaatatttcacattctttcccgcgatgccgagtgaatcggatgaacgatgccaaaatgtggcgtccctaacccttaagttagcatttcccgctgcggcagggaaaccctgccgcacgataaaaccacatatctgctggcatattcggcagtaaacggtcttagcgaacaaattgatgagaaagcttctcaaaacgtcgaatttataaggatatgggggcaaccgggcgaattgcaatggcgggaaaatgtaagcggttaatgcggcaccgatccgatgccgcctattttgtgacatggtcacgtcatgacatgattaaccctccatctacattgatggtttggccggtgatatagtcggcatcgtctgaggcaaggaaggtcaccagacccgccacatcttcgggttgaccggcacgcttgagcgggatgcctgccacccactcggccatcaactcccctttgccgtaagttttttccgggccgctgagaatttctccccaaacgcggtcgttatattcccacatctcgctttcaatgatgccggggcagaatgcattgacggtgatgccatgtggcgccagctcaagcgctaaactctgcgtaatgccgatcacccccattttgctggcggcgtaatgcggtgtgtaaatgaacccgttacgtccttggccagaagacgtgttgatcaaccgcccacggcgttggccgaccatatatttggccgcctcccggcagcagagccagaccgccgtggtatttaccgccaacactttctcaaaatcgcttttgggcatctggtcaaaacgatcgatagtgatcaccccggcgttctgaatggaaacgtcgatcgcaccaaatcgctcccagacctgacgataaaaatcaaccacctgtgtttcatcggtgacgtcgaggatgaccgacagcacccccgcccgataacgctggcgcagcgtttccgccgtggtcaggatgcgatccgcattcgacgcgatcgccaaattggcgcccaaactggcgaaacgctcggcgataccggccccaatgccgcggcatgcgccggtaatcaccacggttttccccgtgaagtcacgattcatgattgttctcctgtcatcaatgaggccgtctgcggccgccacaaggtgcgctgtaccgcctgccgccacgcgctgtagttttcctgcaactgccggtggcgctgcatatcgggtttaaactcatcatgttgaggcaacagtgccgccagttgccgatcggtagctccccacaggctgcgcatcgccatcaaagccgcccccagggccgacagttccgccgtgttgctgcgccacaccgggcaacccagcagatcggcctgaaactgcatcagccagtcattgcggctggggccgccgtcagccatcagcccctgcagcgcaaaactcggttgttgccgcagtacgccgatcacatcggcgatttgataagccaccgattcaaaagcggcccgcaccaaatgttctcgccgcgtgccgcggctgagcccgcaaatcacgccgcgcgcctgctcatcccaccagggtgcgccggcaccggtcagcgccggtacaaaatagacgccaccgctgtcgggcacgcgaacgggcagttcactcaacggcgcttcaccctccgacggtatggcggcgatatccagcatccaggcaatagcgtcgccggtgtggggaatattgccctccagtgcgtactgcatgcgtccaccgtcatgccaggcgatggtcgttgccagagcgctcgtgtcgcattgcgctttgacgattggcgccattaccgatgagccggtgccataggtggctttaacctgcccagcctgacccagcgcatgaccataaagcgccgcatgtgaatcccccaccatcgcagcaattggaatgccgtcggcaatgccttccaatcccaacgtcgtgccgaacagatggctggaaggatggatcgtcggcagcgcctgacggggaatattgaacagcgccagcatctgctcgtcccactccccggatgcgagattcagcagttgagttcgggcggcattggaaacatcacagccgaatgcccgccccccgctcaactgccacagcagccaagcatcgatggtgcccaggcacagctcgccgttctccgccaaccgttgtccctcttcgcagtgatcgagcaaccagcgcattttcgacgccgagaacaacggtgaaagcggcaaaccggtggcgcggcgcaccgcttcctcctgccgatcgcgccgcagccgttcgcagaaatcggtggaacgcgcgcattgccaggtcagagccgggccgatcggttggccgtcagcgcgacgccagccgatggcggtttcacgctggttgctgatggcgataccggcaatgcgggatgcgccggccaacgcaatagcctcccgcaataccgccagagaggccgccagcaaggtctcgctccgttgctccacccaaccgggctgcggcgtctgcaacgtcagtggcctgctggccctggcgacgatcgtaccctgcgcatccaccaccacggccttggcgttgctggtgccctcgtccaacgcgacaatgcaatccgctttaaccatggctcacctcagccagcggctgcaccgcttttttttcctggcgctgcatcagaataaccttgctctgcaaacgctgctggaactggtcaatcaccacggcggtgacgatcaccagccctttaatcaccatttgccagaactcgctgacgcccatcatcaccaagccgtccgccagaaaaacgatcacaaaggcgccgatgatcgaaccgaataccctgccgcgaccaccgctgagcgccgtaccgcccagcaccgtcgcgccgatggcgtccatttcgaacatattgccggtcatcgggtgcgcggtttgcaattgagaagcgatgaccagccccaccagcgccgcacacagcccggaaaacgcatagacgaacattttcactttgacaatcggcacccccgacagccgcgccgccggctcattgccgccaatcgcatagatataacgacccagcggcgttttcttggtgagatagatccccaacaacacgatggccaacatcagccaaatcgggttgtaaatccccagaaaggtgccggatcccagggccgcgaaaccggtgttgcccagcgcttccaggcccaccagattgggataggttttgccgtccgccgtcagcaacgccgccccacgcgccacgtacattgcacccagggtgcaaatgaacggcgcaacgccgagccgtgtaatcagcgtgccgttgatcaaacccaacagcacgcccaacaacgccaccgcgccgatcacttcaaagacgttgagaaacagccgattgccatcccacagcgggataccgacggtcaacagcgcaccggcaaccatcccgcacaaccccgccaccgcgccgaccgacaagtcgatgccgccggtaaggatcaccagcgtcatgccaaccgccagcagcccggtaatcgctacgtgttgcgtcatgatcagcaaattggagacggtcagaaaattcggcaccatgctgctgaagaacagcaccaccagcaacagggcgataaaggtacgcgcctgcagcaaatacatatacaaccgatacttggtttgcattgccttatccttatgcatgaggggttgaggcgcggatcagcgtttcacgatcggcccgttcgcgcggcagatcggccgtcaactgcccgtccgccatcaccatcacccggtcggccagtgagaccacctcatccagctccgacgaagagaacatcaccgccaatccctgacgcgccatcgcgccaatcaggtggtaaacgtccgttttggcaccgacgtcgattccgcgcgtcggctcatcgagaaacaccacctgcggcccggtcagcagcgccttgcccaacaccactttctgctgattgccgccgctcagactggtgattggcagctcccggtcactcaccttgatcgccagtttttcgatcatgccatcgaccaacgcgcactccccggccgacgccaacggccgtagcgcattacgccccaggctggccagggtcatgttggccttaatcgacatcatctgcaccagcccctccgcctgcctgtcttccggcaccagcgccatgcccaacgccatgcgttgacgaaaacccaaccgttccacgcttttgccgttgagcaaaatgcggcctgcagtctggcgcatcacgccgttgagcactttgaacagttcggtacggccggcacccaacaggccataaatgccgatcacttcccctttgcgcagtgaaaaactgacgtcgttaaggcaatagccgccgttttcacgcggcagcgtcagctgttcgaccttcagcacttcatccccttgctctgccgcgcaataatcaaagtgcttgctcttttcccccaccatcttttcgatgatccacggaatgctgacgttactgaccggctcggcggcaacaaaacgcccgtcgcgaaacaccgtgatgcgatcgccaatctccatcagctcttccagtcggtgagaaatgtagatgagggtgacgccgcgttttttcagatcggcgatcacccgaaacagcgtgcgcacttcggcctgactcagcgccgacgtcggctcatccatgatcagcacccgggtgtccttcgccagggcacgggcaatttcaaccagttgctgatgaccgataccgaggctgcccaatggcgtatgtgggtcgatatccaattccagccgctgcagcaaggacttggccagctgatactgatagtcgacattgatgcggccgcgctggaagaactcgttggccataaaaatgttgtccatgaccgacatgttggggaacaggttcagctcctgaaaaataatgctgatcccgagccgctccgcctgctgcgtggaggttaacgtcaccgctttcccctccagctcgatggtgccggaggacggggtttccacccccgccaacagcttcatcatggtcgacttgccggcgccgttttcaccaatcagtacgttgacctggttgcgaaacacttgatagctcacgctatccaacgcggtgacgcccggatagagacgcgaaacgttgcgcgtttgaataatgatcggatcgctcatcacgcccccttaaggttgaatgcgcaccggcgtgatcaacagcggctcggcgggcgcctgccagctgctgaatacgccatacacggtaatgtggtcacccaccttgggctgggatccggccagttcgtcgatcgaagcctggttaatcgccctggcaaaatcgccgaacagcgcttggtcattgaaatcgctatagctcaggccgcgatagctgtcgcgtaacgctgtcccgcggtagaccggcccgatctgcacctccacgctgctgagcggcgcatcggtcagtttgagcgttaattttccgctgcgtgaacgggtattgaccgccgcgacttcaccgctgaccttaacgttgaagtaacaaggaaactccggttgagcacggtacccaagcaggccgcaagcgctgttaaaatccttggcctggtcgatccgggcgatcagctcgcccagcggctgcgccgttttgaccgcttgcggggcgatttgactgcggtaaatctccaccgcctgcgccacatgcgcattcaccggggagcgaagctccgccagctttttctccgagacgatacggcaaccgctcaacgccaggacgacgatgacggtcaacgcaatacgcatcgacataacaacacctccgatcgccccccgccgccaggacggggtggtgaaagacgccgctcagcgcggattacggtttaaagttgaagtcattgactcgctgcgcattgtctttgccgatcaggatgccgcggaacatcacgcgttccttgccggtgtagctgccggattggaagtagccatccaggatctcgacgccctgcgcggcaatcgcctgcgcctgcagcatcacgctggcgtagaggctgccgttgagaatggcatcgcgctcatcgttgctgccgtcgatccccaccacggtgacatcctttctgccggcggccttcagcgccgccactgcgcccagcgcgaccggaccattgccacagatcacgcctttgatgtccggatgcgcctgcaggatgctgtccataatgcgtttcccctccagcagattacccttggcgtcttggcgcgccacgctgaccatctccgggtattggtcaatcacgttatggaacgattgcgaacgcgtaacgcagttattgtccgccagattgcaggtcagttcggcgtatttaccggtctcccccattttttccacaaactggttggcgacgtccgagccggcctggaagttgttatgggtgatctgtgccaacgccacgccatcgaccgggatctcgcggttgatcagcaccaccggaataccggcgtttttcgcctgctgcacggcggcgacgctggcctgggaatcggcgttatccaaaatgatgccctgaaccttgcggccgataaccaggctgatgagctccccctggcgcttgacgtcttcaccgtgcgacagcaccagcgtctggtagccgagagacttggctttggcctcggcccccttggcttccgcggagtaataaggattgtccaacgagttgacgaggatggcgatcgtgcccttttccgccgccatggcagaggtgcaggcaaaaccggtgagcagggtaaggtaagtggctatttttctcatgatggtgttctcttatcgttgtgttgaacatcgtctggtgttggcgatcgctgcggttgccgcttaccaaatggtaaaaccgccgtcgatcatcagatccgcgccggtgatcatgtcgctgccgttgctggcaaaaaacaggatcgccgctgcgatttcatcggtataggcaaagcgccccagcgggatcagctttttcatcgcctcgcccttctcgccgcgccaggctttctctcccataggcgtcagcactacggtgggcgataaggtgttgacggtgatgccgtgtggcgcccactctttggccatcaccttggtcatgcccagcagccccgccttggcagaggtataggcacagtgatcgtcaatggcgatagaggccgcctgcgacgcgatgttgatgattttcccgccgtggccggcggttatcgcgcggcgcgccaattcttgcgagcacaggaaaggcccggtgaggttgaccgccagatggcgctgccactcctcgagcgtgacctctgtagccggctgcaaattaacgtagccggcgcagttgaccaggatatcgagccggccaaagcgccgctcagccgcgttgaaggcggcaactaccgagtcggggtcggtcacgtcacacacctgacagaacacctgttcttcgcccaactctcgtagcgccaccgcggccttgtcctgttcaaagagcgggtacatcaacaccaggcgcgcgcccttttccaacagcaggcgattggcggccatcgcgatgccgcccaaaccgccggtgattaccgcaaccttccctgccagcgacatccggctatcgacaccgtagcgtaaattaacgtcgtattcgttccgctccatcgcattccccctattgcgttaactgagcatgcaatcctgccgcgtcgatggcatattgccgccgcagcgccgcccggctgctgctgtgggtaaattcgtaagccggcacgcccagcgcggtaaacggccgcggcagctgatgccgcagcaacagttcaccgatgatggtgcctaaaccgccgctgagcgcatgctcctccatagtcagcacccgacggtgcgagcgcatcaacgccaccaccgcctcctcattgagcggccagagcgaagggagagagacaatggtcgggttatcgcccaatgccagtaccttcatcgcctcatgagccaccgtgcccaaacagaacaccaggctatcttccccttggtgcaacacctccggctctccgggacggaattggtaatccgcgttcaataccggcagcttgtcgctgtccatgcgaatataggccgggccgggttgcgcgatgacatgacggacaatctctgccgcttgccgcgcatccgccggcgcatagacgctgagattgcccagcgtacgggcgatggcgatatcgttcatgcagtggtgcgtcgcccccagtggcccgtaaccaaatccggcattcaggccgagcattttcacgttggtctccgtgtagcaaacatcgtttttcatctgttcgtttgaacgagcgaacaggaagggtgccgcgttggcggtaaagaccgtacggccgctgagcgccatgccggcagccatgccgaccatgttctgttcggcgataccgacgttcactacccgctccggataagcctgctcaaagggcgcgatttttgacgtggacgtggaatccgccaccatcacgctcagatctgcacccgcccgttgctgttcgatcaacgccgtcaccaccgcatcgcgtaaatcctgcatgtttacccctccagttccgccagcgcctgcgccagctgttgttcgtccggtaccgcgtgatgccaggcggcaacgttagccataaacgacacgccgtgccccttttcggtattggccaaaatcactcgcggcttgtcctggctcggaagttggatcgctgccaccaacgccgccggatcgtgcccgtcacactcgacggtttcgaaaccgaacgcgcgccatttttccgccagcggttccagcggcatgatggcctccgtcttgcccgccagctgcagccggttacgatcgacgatggcgatcaggttatccagcttgaatttgctggccgccattgccgcctcccagttggatccctccgccagctcaccgtcacccagcaggacgaaagcgcggcgatgcccacgccctgccagcttattgcccagcgccaaccccacggcgatcggcagcccatgccccaaaccgccggaattaatctccaccagctccggcaacttctgccgcaccggatgcccggccaacaaggtgtcgtcgcccatgaactgatcgagcaccgccggatcgagcaagcccatcgccgcacagctgcagtaaaaaccgccggcgccgtgccctttagacaaaatgaaccgatcctgatcgggccgggcattgctgcgatccatcactgccatatacaaagtgcagatgatgtcgatttccgacagatcggcgccggtatgacccttgcctgccttatggttcatggtcaccacatgtcggcgcgcctggcgtgccgtgtttttaatcgcctgaaagtccatcgtcacctctgcttaagcgccttgattatcgttatcgcatcaaaagcgatccgttaactcaccattgattttcgaatggaaatcatatgcagcaaaaacgataattaatgtgggcaagatcaaatttcaaacaaaagcacttatcagacaacactcatgtcgacaaaaaccaataaataacaacatgataaaaacaacccagctgctttaattgagttttttatcgttgatttaatcggataccaatgattttcgaataaaaatcaacgctgcttaaccgggtttatccgtggctttatcaataatcgcgagctaaaattcagcgcatcaatatggagtggccgtggcaaaccgcgcggcgggaactgacaggtgcaggagtctttcgattgaaaagcaaaagcgaacagttggcggaaatgcagcaacggcgcgaaaagatcctcgacatgatccgcgaagacggctcggcgacggtcaaaatgcttaccgataccttcaagctgaccgaggcgaccattcgcaccgatctgcgcgtcctgcagcagcaaggctatgtgaagcgcttccacggcggtgcaaccctggttgatggcaagcaaaatacgcatgccatgctgctggaacgccaggttaacctgaccgccaaagatcgcatcggcaaactcgccgccggttttatcgaacccggcgacaccatcattcttgattcgggcaccaccaccacggctatcgccaatcacctgaatcacataaagaaactgtccgttatcaccaccggcgtcaatattgcgctgcagctgggcggcgaaccgggcgtgaatattttgctgaccgggggctcattcaaatttccgacgctctccacctccggggacaaagccgccaatttcttcgaaaacgtgctggcgcaaaaactgttcctcgcgacggcctgcatctcgccccgccacgggctcagtttcccaagcgaaaccgacatcaaactgaaaatggcaatgatcaatgcagccaacacggtgtatgtggtggccgactccagcaagatcgataaggtttcaatgtttgcgctgccttgtgactggcaacatatcgactatttgattaccgataacggaattggcgatgccgccaggcaggcatttgaacaggtaggcgttaaggtattggtggcagacgcctgactggcgcctgcgagaagaatgcttattccggcttgcgcgccgcgatttcctgctgctcttgtggcggcggcgtcagcgggccgaaccagcgctgcgccagccagcaggtgaccaccaccagcagccaactgatcagcgtagccatcgccagatcgcgcggccagtgcatgcccagcagcagacggctgcccatcacccccgttgcccacaccatcagcaacgcaacggttttataatggcggcgcggccacagcagccctacgcccaacagcgcccaggtggcggcgaacatcgtatgccccgacgggaaagcgaagccggtttcaaactgccagtgcttgcgcagccagttcggcaccagcgtctggtcttgcagttgctcgcgcaccagcgcgctgcgctctttgcgatgcagcgaatagaaatattttccgtccacgccgtgggtttgctcgagccataccacaaacggccgcggttcttgcacccgatccttgatcaacgacttgaccccctgcccaatcaccaacgcggcggaaagcaggatcgccagaccgatggccgccttcagccgaaagcgcaggcaccacaaaaaccaaccgcaaaggatagcgctggtcagaatgccccacggcgaggttacggtttcggtcacccagaacagcgctttgagcagccgctcattgccgccgggctgccaatgccagccggaggcccataccaccagcggcatcaacagcagcagcagcgcgccgcccgccgtacgttttgctatctcatacattcccgttttcctctgcgtgaatcaggttgcagtgtaacaagagtgcaatattgataacacgcgaaaaattaaacagatagaaaacctatcgcaataataggtggccagaaaacgccatctgctggtttgctgagcaccgcccggcaagaagttgtggcaaaatagccgataattaacgaaatagagatcggcgtagcacgttttagtcttggtcaatttactaaaccggacttaggatgcgcgacaatgattgaatcgtaggtttttgtggagagtgacatgcagctgaaacgggtggcagaggctaaactgccgacaccttggggcgatttcctaatggtaggattcgaagaactggcgaccggacatgaccatctggcactggtattcggtgatatttccggcgaagcgccggtgctcgcacgcgtgcattccgaatgcctgaccggcgacgcgttattcagcctgcgctgcgactgtggttttcaactggaagccgcactggagcagattgcggaagaaggccgcggcatcctgctgtaccatcgccaggagggccgcaatatcggcctgttgaacaagatccgcgcctacgccctgcaggataagggcgcagacaccgtggaagccaatcaccagctcggcttcgctgccgacgagcgcgacttcaccctgtgtgccgacatgttcaaactgctgggcgtcgacgcggtgcgtttgctgaccaacaacccgaaaaaggtcgagatcctgaccgaagccggtatcaacatcagcgaacgcgtgccgttgatcgtcggccgcaatccgaagaacgaacgctatctggccaccaaggccgccaaaatgggccatttgctcgaccagaagtgatcgccaccgccgcggaaacaatcagggcgccttacggcgccctttttattgattaattacagcattttcctgatcacatagtgcaggatgccgtcgttttcgtagtaagtcagctcattgccggtatcgatgcggcaacgggtgtcgaccacttccttgcgcccgtcggtataggtgatgtgcaccggcaccgtctggcccggctgaagctgttgcaggccgccaacgctgatctgctcatccccggtcagccccagcgttttacgcgtcaccccttgcgggaactccagcggcaaaatccccatgccgatcaggttagagcggtgaatacgctcgaaggattcggcaatcaccacccgcacgcccagcaggcgcggccccttcgccgcccagtcgcggctggagccggaaccgtactctttaccggcgatcaccgccagcggcaccttctcctgctgatactgcatggcggcgtcgtagatagacagctgctgttgcgaaggaatatggcgggtatagccgccttccacgcccggcaccatttcgttgcggatgcgaatgttggcgaaggtgccgcgcatcatcacttcgtggttgccacggcgtgaaccgtaggagttgaaatcctgcggcgctacgccatgctcgctcaggtaacgccccgccgggctgtcgcgcttgatgttacccgccggcgagatgtggtcggtggtcaccgagtcggccagaatcgccagaatgcgcgcatctttgatgtcctgcaccggatccggcttcaccttcatggtgctgaagaacggcggatggcggatataggtagaatcctcctgccactgataggtcgccgaaccggtcacctggatcgcctgccagttggcatcgccgtcgaacacctcgccgtactccttgtggaacatctcggtgcgcacttcttccaccgcctgagcgatgtcccggctgctcggccagatgtccttcaggtagaccggctggccatcgttaccctcgcccagcggctctttggtcagatcgatcttcatgctgcccgccagcgcataagccaccaccagcggcggcgaggccagccagttggttttcaccagcgggtggatgcgcccttcgaagttgcggttgcccgacagcaccgcgcccacggtcagatcgccctctttgatcgcttgctcgatcggatccggcagcgggccggagttaccgatgcaggtggtacagccataccccaccaggttgaaccccaactcttccagataagcggtgagtttggcgctgtcgaagtagtcggtcaccactttggaacccggcgccagcgaggtttttacccagggtttgctgcgcagccctttcttgacggcgtttttcgccaacaggccggccgccatcatcacgctcgggttggaggtgttggtgcaggaggtgatcgccgcgatcaccactgcgccgtcgcgcagttcgtgctgctgcccgtccagcgtaaaggttttgctgtctgtcttggccttgtggccgccgatatccagctcggtagcagccttgaacgcctgcggcacattcggcagcgccacgcgatcctgcgggcgtttcggcccggcgaggctcgcctccaccgtcgacatatccagcgccagcgagctggtgaataccggctcatctcccggattgcgccacatgccctgcgccttggcgtaggcttccaccaacgcgatttgttcggcgctgcggccgctgagcttcatatagccgagcgtaacgtcatccaccgggaagaagccgcaggtagcgccgaactccggcgacatgttggcgatggtcgcacggtccgccagcggcagatcggccaggccgtcgccgtaaaactcgacgaacttgccgacaacgccgtgtttgcgcagcatttgggtgacggtcagcaccagatcggtggcggtaatgccctcgcggagcttgccggtcagcttgaagccgaccacgtccgggatcagcatcgacaccggctggcccagcatcgccgcttccgcttcgataccgccgacgccccagccgagaatgcccaggccgttgatcatggtggtgtgagaatcggtgcccaccagcgtatccggataggccacgcggcggccgctttcgtcgctgtgccacaccgtttggccaaggtattcgaggttaacctggtgacaaatgccggtgcccggcggcaccacgcggaagcggttgaaggccttctgcccccagcgcagaaaggtgtagcgctcgtggttgcgctgcatttcgatgcgcacgttgtcttcaaaggcattatcgtcgccaaattcatcgacggtgaccgagtggtcaatcaccagatccaccggtgacagcgggttcacctggtcgacattgccgcccagccgccgcaccgcttcacgcatcgccgccagatccaccaccgccggcacgccggtaaaatcctgcatcagcacgcgtgctggacggtaggcgatctcacggtcagcatggccggtttgcaaccaggcgacgatggccttgaggtcgtcaacctgcacggtgtcgccatccacatggcgcagcaggttctccaacagcactttcattgatttcggcaaccggtcgatatcacccagctgcttcgccgccagcggcagactgtagtagtaatattcgctattcagcgcaaccagcttatccagacttgtttcacgaagatcggacgacatagctcctccatttcttattgtgattaaaacagggtaatcagtgaggtcttgtttaaagataccacaaagataagttaacgttttgataacaacacgatttgatcacaacgataggcgggaacaatcaagaggaaggaagtgcgagcgcagccaaggagttaggccacacgtcaacgaaaacgccgcaacgaggcggcgttttcgcagggaaaatctcgcggctctagcgggattggcgcaccaggcggcgacagactgtgagcacaactgcagcaatgatggcagagacacccaatttaatggcaatgacagccgagtcgaaattattcatccctatttcaccatcaccgctaatttcaatgttgttggaaacgaagctgtcgaaaggacggcggcttttcaggatgatcctgagaaacaaggaaggtgcgggtttccgggctaaaaaaaccggttaggcaggcacctaaccgggtttgatttgatatcgtcaacgattacttaatcggcagcttgatgtccttgaacatcgcttcgatttcttcattggagcgcagcgccactgcgctgtcgaccacgtcgcgcgtcaggtgcggcgcgaagcgctgaatgaagtcgtacatgtagctgcgcaggaaggtgctacggcggaagccgattttagtggtgctatatgtgaagatatcgcgcgcatccaccgtcaccagatccggatcctgcaccggatccaccgccatgctggcgatcacccccacccccaatcccagacgcacataggttttaatcacgtcggcgtcggtggcggtgaagacgatgcgcggcgtcaggccggcgcggttgaaggcggtgtccagctccgagcggccggtaaagccgaaggtgtaagtgacgatcgggtaagccgccagctcttcaatgctgatgctgcttttgcccgccaaaggatgatcgggcttcaccaccaccgcacggttccagtggtagcacggcaacatgatgagatcgtcgtacaggtgcagcgcctcggtggcgatggcaaaatcggcggtgcccttggagaccgcttcggcgatctgcgtcggcgatccctgatgcatgtgcagcgagacgcgcgggtaacgctcgataaagcccttgatcacgtttggcaaggcgtagcgagcctgggtatgcgtggtggcgacgtacagcgagcctttgtccgggtaggtgtgttcaccggcaacggctttgatggcgtctactttggacaacacttcacgcgcgatgcgaatgatttcctggccggcgggggtgacctgggtcaggtgcttgccgctgcgggcgaaaatctggatgcccagctcatcttcgagcatgcgcacctgtttgctgatgccaggttgagaggtatagagcccttctgccgtcgaggagacattcaggttgtggttaaccacttccacaatgtaacgaagctgctgcaatttcatatcttataccatcctaggttaaacactgcggcttacccgcagccaggtatatcggtgtcgccccggtatgctgaaactcacaagccataaaccccgtgttctaccctgatggtgaagaaaacgccgttgttaataagctttaataataaaaaaactttttatataaccactataccacgatgcagcttcaagtatagatccgcgtcacactatgataacgattattttgcatgggtatcaacgtgaaacggcggtgtcggagggataaaaacagcaaaggatagatccgtttgccccttttcaccaataaaaaaaccagccgccagggctggtttttcatcttgcgggcaggacatcggccttacttcttgccttcgacccacttgccgtccacgtagaacgcggaccaaccggtcgccttgccgtctttttcagaggagacgtactgctgcttggttttacggctgaaacgcaccagcgttttgttgccttcggcatccgccaccggcgcatcagccagatagcgcagtttctccggcagacgatccttgaagcgagccagctcttccaccaacggcgcgcgggtctcgcgcgatttagggaaggtgttggccgccaggaacacgccggcagcgccgtcacgcagcacgaaataggcgtcggacttctcgcacggcagttccggcaacggcaccggatcttccttcggcggcgcgacatcgccgttacgcaggatcttgcgggtgtttttgcagttctcgttggtgcagcccatgtacttgccgaaacgccccattttcaggtgcatttccgaaccgcacttgtcgcactccaccaccgggccgtcatagcctttcaggcggaactcgccctcttcgatctcatagccgtcacacgccgggttgttgccgcagacgtgcagcttgcgctggttatcgatcagatagctgtccatcgccgtaccgcatttctggcagcggcggcgggcgcgcaacgcgttggtttccgcgtcgtcgccttcgaggatgttgagcacttccgcttcaggcaccaggttgatggtggttttgcaacgttccttcggcggcagcgcgtagccggaacagccgaggaacacgccggtgctggcggtacggatgcccatcttgcggccgcaggtcgggcagtcgatgctggtcatcaccatctggttaggccgcatgccgccttcttccggatccttctccgccgtttccagctgctcgctgaaatcgacaaagaactcgtccagtaccgctttccactcggcctggttgttggcgacctcatcgaggccgtcttccatgcgtgcggtgaagtcatagttcatcagctcgcggaagttctcttccagacgatcggtgacgatctcgcccattttctcggcatagaaacggcggctttccacccgcacataaccgcgatcctgaatggtcgagatgatggaggcgtaggtggacggacggccgatgccgcgtttctccagctctttcaccagcgaagcttcgctgtaacgcgccggcggcttggtgaagtgctggctcgggatcagtttctgcagatccagctcgctgccgatttcgacgaacggcaacgtgcgatcttcatcgcccttgcgcaacgccggcatcaccttggtccagccgtcaaagcgcagcgtacggcccttggcgcgcagctgataatcgccggctttcaccgtcagcgtagtggaatcgtattgcgccggcgtcatctggcaggcaacgaactggcgccagatcagctgatacagcttctgcgcgtccgcttccatgtctttgagctgctcggcgagcacgttcacgtccgaaggacggatcgcttcgtgcgcttcctgcgaattctctttgctgctgtactgattcggcgccttcggcaggtatttatcgccgaagttgtcgccgatgtagccacgcaccatgttgagcgcatcctggctcaggttggtggagtcggtacgcatataggtgatgtggccggcttcatacagccgttgcgccatcatcatggttttcttcacgccgaagctcaggcgggtgctggcggcctgttgcagcgtggaggtaatgaaaggcgcgcccggcttgctgctggtcggtttgtcttcgcgatccagcaccgtgtagcgggctttttccagcaacttgaccgcggcgtgagtctgctcgcggttaaccggcttgaacggtttgtcgtgcgcatgggtcacttccatctgcagcgcggtttcacccttcgccagcagatcggcatgcagctcccagtactcttccggcacgaacgccttgatgtcgcgttcgcgctccaccaccagacgcaccgccaccgactgcacacggccggcggacaggccgcgggcgattttcttccacagcagcggcgagaccatataacccaccacgcggtccataaaccggcgcgcctgctgcgcgttgacacgatcaatgttcagctcgcccggctgtttgaacgcctgttggatcgcgtttttggtgatttcgttaaacaccacgcggctaaagcgtttgtcatcgccaccgatcacttcccgcaggtgccaggcaatggcttccccttcgcggtcaaggtcagttgcgagataaatgtggtcggcgttttccgccaacgattttaactcggcgaccactttttctttacccggcaggatttcataatgcgctttccagccgtggtaagggtcgacgcccatgcgatttaccagcgccgccttctcatcttttttaacttttttcttggctttgtcttcggttgagtcagcgctctttttgctggctgagccactggtcggcaaatcacggatgtgaccgacgctggacttcaccacgtagtcacttcctaaatatttattaatagttttggcttttgccggggactcaactattacgagagctttacccatatttacctttacctaatttatttcttctaaaaagaagtcttttatctcgccgtgccgcggcaattcgtgtctctttttttatattgcggcagtctggcaagagatcaacagatttttttcttttggttgcccaactgctcaacctgaacgcaagttgttgatcctgcctgctattcacccatgccccagaagtatggctgtgtgagttttattcatggcgtaaacaaaaccttccacccgacgccgcaaaatcccacactgtacctgataaaaagcgtcacgcaacctaattagcatggaaagtccgatttcgccaaccggcggccgcccatggccatccagacggcaaataaaccttagtcggtttgcggataaaagcgaaccggcgttagaatatgcgcagagtttttagtttggagtctaataaatgcgcacgaatactgcacctatcggccgcgaggccctgctagcggaagcaaataacatcatccgccaacacgaagattatctgcacggcatgatcgccaccgacgttgaacaaaaaagcggcgttttagtttttcgcggcgaatactttttggatgccgatggattgcccaccgccaaaaccaccgcggtatttaatatgtttaaacatttggctcacctgctttcggaaaaataccacctggtcgattaagacaagaaaacgggggcgcctggcccccgttgattcccgctctcgttgccgttacaacaacggcttttccccacgctgccaccagcgcagcagcaaacgatcgacgctttccgccgcgctgccggtgaagcgatccatcaggcgtttgcggcgcgtatagcgcacagcgatcacttcgtggttatccagctcggcgatcagcaaatcatcgctggtgccgatggcgtcgatcaggcccttctctttcgcctgtgaaccgaaccagtgctcaccggtagcgacgctgtcgatgtcgagcaacgggcgctgctcatgcacaaagcgcttgaacagctcgtgcgtttcgttcagatcttctcggaacttctcgcgcccttgttcggtgttttcgccaaacagcgtcagcgtgcgtttaaattgcccggcggtgtgcaactccacgtcgatatcgttctttttcaacaggcggtggaagttcgggatctgcgccaccacgccgatggaaccgatgatggcgaacggcgccgccacgatgcgatccgcaacgcaagccatcatgtagccgccgctggccgccactttatccaccgcgaccgtcagacgaatgccgcctttgcgcaggcgctccaactgcgaagccgccaggccgtagccgtgcaccaccccgccagggctttccaggcgcaacagaacttcatcctgcgccgacgccaccgccagcaccgccgagatctcttcgcgcagcgaggtgacctcgtgcgcgtccatgctgcccttgaagtccagcacatacaggcacggcttggccacttccaccgcgccggacttggcgcgctgtttcttcaatttgtcatcagatttagtctgctttttgaactgtttcagccaaaccttctgctcggcggcatccatgcgcgccaggcggatatcgcgctgcatctcgcgatactgttcgccgagatcggtcagctgcagctcccctttctggcggctcttgcgttgccccaaactgaccgccaggatggccaacgcggcgatggcgagcaccaccgtggcgaccttggccagaaacaggccataaacagatataaactccacagattccgcctttatttacaggttgttagtatgcttatttccattttagccaaccgcagcggctgctgtcgcggctaaatgaaaattcattgcgcacagagcatcactatggggacgatttacggccgaaccaagccgccaccgccgcgcttttgttacaaaagaatgccatttcagcctgctacgcattgaaaatgcccgcggattaaggcatataacacccattattcatcaatatgatgagacggattcgctgcgcggcccgcagacggtcgagccttcgctcccgccccggccgcgcgtttcacccttgctccccgatatctgcgggagaacagccacccaggcgaggatttatcgtgcattaccaacccaaacaagatctgctcgaacaacgtatcattttggtcaccggcgccggcgacggcatcggccgtgaagcggcgctgacctacgcgcgcttcggcgcccagttggtgctgctggggcgcaccgagagcaaactgctggcggtacaacaagagatcgcagcccagggcggtgccccggccctggtggtgacgctggacttgctgcacgccactcaggagcaatgccggcagatagccgacgatctggcgcaccagatcccccgccttgatggcgtgctgcacaacgccggcctgctcggcgacatcgcgccgatggccgacctgtcgatgaccatgtggcaagaagtgatgcaggttaacgtcaacgccacctttatgctgactcaggcgctgctgccgctgctgctgaaatcccacgccggttcactggtgttcaccagctccagcgtcgggcgtaccggccgcgcaaactggggtgcctatgcggtgtcgaagttcgccaccgagggcatgatgcaggtgttggccgacgagtacaaaaaccgcaatctgcgggtgaactgcatcaatccgggcggcactcgcaccaaaatgcgcgcatctgccttcccgcacgaagacaagaacaagctgaaaaccccgaccgatatcatgccgctgtatctgtatttgatgggcgaagacagccgccgcaaaaccggcatgagcttcgacgcgcagccgaaccgcaaacccggcgcagccgaataagcaggagcgtttcatggcggaagatcgtcatcaacagcgccagcagcgcctgaaagaacaggtcgatgcgcgcatcgccgcggcgcaggacacccgcggcctgctgctggtgtttaccggcaacggcaaaggcaaaaccaccgccgccttcggcaccgtcacccgcgcggtcggccacggcatgcgcgccggagtgatccagttcatcaagggcgaatggcccaatggcgaaaagaatctgctgcagcaacacggcgttgaatttcaggtgatggccaccggtttcacctgggaaacgcaaaacaaggccggcgacaccgccgcctgccaggcggtgtggcagcacggcaaacgcatgctggccgacagcagcctggatctggtgttgctggacgaagtgacctacatgctgacctacggctatctggaactggaagagctgaaggcagcgctcctgcaacgccctgcgcatcagacggtgatcctgaccgggcgcggctgccatcgcgatctgttggaactggcggatacggtcacggagatgcggccggtgaaacacgcgttcgacgcgggcgtgaaggcgcaacaagggatcgattggtaacaaaacgttctggccccgaacggggccagaacggcgggattagctgcgtttgcttggcttgcctggtttgctgcctggcgcactgcggcggccgctgccggccacctgcgagtggcgcttgaccgcccggcggatctggttggccttcacgcggcggcgctcacgctccaccggcattttgctgaccgtttccggtttcaactccaccagctcgcgcaggtagttgatcgccggcagatccagttcggcccagccgccgcgcggcaggcctttcggcagatcgatgtcgccgtaacgcacgcggatcaggcggctcacctgtacgcccaccgcttcccacaggcgacgcacttcacggttgcggccttcggtcagggtcacgttgtaccactgattgaggccttcaccgccctggaagctgatggtacggaaggcggccgggccgtcttccaattgcacgcctttgctcagctgcttcactttcgcatcatcgacctggccgaacacgcgcaccgcgtattcgcgctccacttcacggctcgggtgcatcagacggttggccaattcaccatcggtagtgaacagcagcagaccggaggtgttgacgtccaggcgccctaccgccacccagcgcgaaccgcgcagcttcggcaggcgatcgaacaccgtcgggcggccttcaggatcgctgcgggtacacagctcgccttccggtttgtagtaagccagcacccggcaaaccacctcttcggactctttgatcgacaggacatgaccgtccagacgaattttcatcgccggcgtcacttcaacgcgatcgcccagcttggcgaccttgccgtcgacgctgacgcgcccggcttcaatcatggtttcgatttcacgacgcgagccatgcccggcgcgcgctaaaactttctgtaacttttcgctcattgagcaacctctaatgtcgccttcacaggcctcatggtatgctatattttcaattggttacggcaaaaaaccccataaccatataattttgcacacattttggaatacgttatgtcaaacaaggtgtcacacaaactgtcacacacaatccaacgtggccggacattctacacaaattttagacttaatgattccaaaaagtttgttcggttatcacttaatactgacagtttgaaacaggctcagttggtcatgtccaaaatgacgccttatattccgttggttcagtctggagcaatgtccgtggacgagttcaaggcaaagctcaacggcctaaaagacctcaccaagcaagatttggatacattccttttgcgccaccttgaagacgactacgaagaggtggaaaggctgccaaaacttgggacactaacgaaacaatatttcggcggcagtattgaccgtgaagcgacgaaaaatgacgctacaggctatgcgagagcaactatagataatatccattcaggctcagattttggactggccgcccttaagcattccctacggcacagggggatcaatcctgagggactaccggatgaaatgagcgatgtcgttagccagattgatatgtcgttggctatgaagtatcaagcttacgaagcattttattcagatgacttcttgaaataccgccaaattttgggttcgctcaaagaacaggtaaagagcctctcagatagagcgccgagtcaaaaccacgctccacaagttcagtcgccctcatccgcagtacggctatctgaagcttggaaaatgtatgttgcagacaaggggcagaaatggcggcgttcagtcgccagtgagaatcaacgattctacgatgttcttttcctcgttgtgggaaatattcccgttgatagcgtcaccaagcagcacataagggaagcactgaagattgccgagaatctccccgctcgaacccgatccccctactccagcatgactctagccgaatgcgttgcctatgatgtcccggaggaggatttaatctcaagtgaacacgtccacaagcatttgaagatatggcgctctctgttcaaaacgtaccttgtcgatcacaaggacattttgacgatctcacctactgacggaataacctatgaggtgattcctaatcgagggggtcactatagcgctggtgaaatgaaaaagttgaaaaaggctctgtccaaccttcccgacacagactggagaaaagattacttcctcacgctcatttataccggtgctcgtcgtgcggagattgccgacattcgtaagcggcacatacggcgcgatgatgaaacgggccgacattacatattcatcgagggtggtaaaaccgatcacgctcagcggcaaatcccagtccacaaaaaattggagggggacctgttcaaacgtatagccctactatcagacgaggatctggtgtttggaggcctacctgattacacaaccatcacgaatggatgggttgctatattggacagtctcggaatcccaacctatgacgagtttggattaaaacgccgaattcatagcctgcgccacacatttataagcacagcgatttccagtgtctcaaacgcggctctggtacagttcgttgtgggccatagtcggacccaatctttggggattacctcgcggtacacgcacaggcctcacctcaaagagctattgtgcgtagttgattgcatcagttgacatatcatgtataaaggcaggagattggcgcgtcaaggtggcagaacctaacacgccagtaagactattaggtattccagtgattctgcatatactcgagaacatctgaagttatattataacaataaaaactgttattctcagcatccacaactactaacttatcatcatggtccatcgctgatctcacgatattagcagcctgctccgccgtataagttgaatcaacataccagttggattctgtaacttttgcccaatcgcccagagatttaattgctttgtatacggcctcataatctttggttttgatcaggtcatatgtaacgaacagattgttagccattctcatatctcccagagtttcaactttaaatgaagcgccttacggcgcttctcatatcacttcttctctttctttggatacttgatcgtttccgtaacggtagtcttagggtgccgctttgcctcagcttcaggcacaaactgaccagtaattgcgctacggacaactttacgttttgacatgaggacaacctctcttagattttaggtgtgagggcgcatatgcgccctcgatgttcggtttcttcaaccagcaatggaagactgattataagatgccattacgccctcgttatagcctttggcatatgctgcctgcgggcttttgtggcgaacagttccggcttggctgtcaggcaaagcatcaaggtcaacccatacttgagggctacgattaaagccgtgctgaaagccttgttcataagcgcaaccgcagcacttatgacgaccagaaccaccttgatcttcaggtagttgaacaaacattggagagtaccgatgacggttgtaacatatagccattctgtattgccttagcccttcagggcacaaaaaggttttacaaggcccgtctatgctgtctacaatccgatttgtcgaatgtaagaaagtagctagctaacggttaactaagggtcgccaaactcttagaggccttgcgtctaggaaagccgagttcacaatgtggattcggcttttttattgccaaggagtttcaaaacactatatgtagtgccccttaattccttaggtaacaagatagtgagaaaaaacggcgtttgcaagtgaacaaactcgggctaatttgtggataacttgggggtgaaatgtaacttgccgcgcgaatcgcgcgccgtgactggcgcgtcaagcttgtcaataagcgtgaacagattttccttaaaaactgaaaaaaccgatcgttcgtgcgacgttttattaaacgttagaaaaaaacggcataattaaccgatttgatattcgaaatttaagatttcacgcctgaagggatggaactggtttaaatgataacttttgtcgcttagagtcttctgtatcaaacgtctttgtacaaggacctctctcctttgtggcgaactaaaagctgtggttcgaattctcatagatgcaaagcgttttaccattggagagctgctcacttgtcggattgctcatagtggccttccctgcataagctggagattgcagcccaaacaggtagctatccccgcccccgccaaaatttcaggtctcatcggtggatctctcctgtggtagacagctagaaaaatattctatgccgtatgcacaacccgtatttttcttagtggtgcttggcacctaccctccggcccgtcaatactttttgagtgattctcaaatatccatgaatttgggcctgtacggcccgctgtggccttttatcaccccaatcccaaccaacctacctttaatccctctcagggcctcctagagcctcccagagaagatgttagtttttacttacctcacaaccccctccagagctacctatttaacataatgggtcttacgcgcacctttgcaacacatccgaccactgagaaataagccttacacaagcctcagccccgctatgcggtgctttggcctgacttgtcggacaagatcgggtgttatcaacagagatcagtgtactgtggatgtttttagggtttctgtgggtaacttgtgcatgaatgcacgatattgcagaaatggagcctaaagcgactagacagccgctaggccctgttttgggcgacaagatacggaccgaggcccggaggggccgaggttggtgtaaatgagaatcattatcacttccaagaaaatgaggcgtcattttgtcacttcttgtcacgtattggaggaacggaaagtttttgtttagcacctacatagcacctgagtatcacttctaaatcctcactacccagccctagcttgtcccaacaagagataaccccttgtccttgctcgacaaatcaagtattcctaaagcgtctcgcatgttacgccgcggagggcgtcggtacattatttgaccaatggttactgtgataatcacccaatagttactatattacataaccattagcacatgataacggttattaaattgtatttgatcggatttattagggtttattcggaaaagagaaaactgttatttatcggtcttacctatcagttttacctttgcaccctccattaattcaccttgctcaattagggcgtggttgtgtcccttgattgctgctgtgtctggggcgtttatagggtttgagaagttaccattttggattgtttctttaatggttctcactccaatatttccggcctcttgtagtgccttgatattacgctttccattggctgcggattgaatgaacaggcggatctgtttctgttggctctttctggcggctacccctgcgctaaacatgaaattacgggccggtagtccgttccatccttcctcatgaatacgggccaaggttgccatattcaggccgctgtggtgtggctcatcataataaccatattctacctccggggcctcatcgataatcttgtacatgtttatcaggccgctgaaatcggattttaaagccatgctgttaatctccctagctagttataagaaaggccctagccgttaagcgtagggcctgtatatcgttgctgtatagttgctatatcgttgccgttagcctgctgatcctgctgtagaggataggatcatgtttaaggttctcatgtcctgatctttaagcatggattcaaccaatccagacacagccccatcatttacttgaacctcagacctaatcagcaattccttttgatcaagggtaacagtaacttgatttggcttaactggtgagctggttcccggtacgttaatcccggtggttaggttcatttgtggagacttgaacgggtaagagatatctgggttagattggcctgttggagccgggcttacccattgtttccaccacccccggaaattctctccagcctctgctacagcgtccgaacccggcagggtatttagaccttttgccagcgggttttctttgcctagcgactgtgggaacagcttttctagaggttcagccaccatatcttgaaggaatacaccccaaccgatagggccagccctgcgggaaactgctgtaactgcgctacctgcaatcttggcggctttgctgcctgtcttgccggttcccggctggttattaccacccaccccgccggtggtcattgcgccgacgttggcaatacctgcggcagataaagcacctcccagagatttaatccccggcaccaatttgatcagaccagataacattttggtgatgcggagcaatccacctgcgaagattaaagcccctgcggcataaccggcaaagttgaaaatttcctcaatctgttttgaatccattccccactttttgagataatgctcaattgtcatatctgcgaatacaaacgagttataaacacctgcgccaatctctgtaaatccttcaacaagaccggctaaagcattacccaccttgccgctcatcatatcagacatcccggagagcgctttagatgcaacctcgaaactttcccccattgcatcgcctaatttggattcaaaaatggagtttttaaacttattccattcgttcaccattcggttaaaacgggcgttaatccctttgactgcgaaatctaatgcgccgcctttgcgagccatatcaccgaaagcttttgctaggtgtggggtgatcttatccattgtaataagaccgttggacatatcctcgtcaaacattccctgagtcatattcaggttgccggtggcattctgccaagctgttaagaatgcttgcttagcgcccggcatggcgtcggccatctgtctgttgagctcctcggctgtaacgcgacctttcccgaacatctgttgtaatgcaaattgcgccagatccattttattcttatccaagtgcaaggctgttccgtattcttggaagcccgtaaacatggtttgcatttggttaagatcgaggtccttaggtcggctaaggttcattttagcgaatgcgtcagaggtggtaactaaatcagttcccagagttgaggctagattttgcagataatcaaacatctgcttcccttcctcttctgttttctgagtcattaaaatagttgaatgaatagactggaagtcaacgccggttttcattaggctgcgaccacctgccaagattccataacctgcgcccgctgtcatcatgccttgcataattggagacataccgccaccaattgaaccggagttcattgccaatgctttgctagtggctcggccttggcgctctacagctttcatttgcttggctaattcgcccattctggcggtgtaggtctgggtaccaattgcaccctttgcaaaatctttattgatcttggcaaagtctgccctaaattgggctttctggtaaacgctggcgctacctgcggcctgttggaattgtggagtaaatcgagacgctcgagcctgcattttatcaacaatgcgttgctgtcttaccatttcccgctgctggcggcgctgctcttgcttctcttgtcgttcctgctgcttacgctggcttgtcttacgcttattacctgcggcctcttggcgttcctgctttgccagccctgcccggtgttgggctgctacccactgaggggaaccggcaagacggcggcgggactgttttagaccctgtcccggtcctgcggcttctttattcagcttcttaatctgagccatagcctttttaaagctactctgatcaacctctgtaataatcgtgttagtagtcttaatgacttgattagacattaataattgccctccataatatagttaaccccttgctggtccatcatttccaacacttgggaggtaattagttttccctcgcagattaggatcggcttatccggatcaaaactgttcttaacccggcggaccttaatcaagccctgagaccgcattctattaaccaactctacagcctcgggggctggtgtatatttacggcggcgtttggctgctgcggcctctgcctctttcttggaaagcttcttagccattattccaccccgtctgtaatggtgtgttcaatgtcatattttgtcagggcttcaattaccaaatcattcaagattttaccgtctaggatatacatgggatcactacccggattgctaaccttgataatgttaatgggtttccgctggcctgtggctttacgaataagtttgcgcttagttaacaggctttcgtgtctgtggttagcgctgtatccctgatcacggtgacaaagggcaatccctttatctttaataggcctgccgtcaacatgtgggacaccgtcgatatattcaacattgacgtggtcatcttcagcggctttattcaggtgttgtttttgctgctgggtgatacttttcaaaacactatcgaaataggacatagcttattaactccttattggattggatgagatagatcaggatgtagagcgcgattatcggagctgctttccataattcctcgagcagtgcctttattatgtctcgccacattgggtaaaattcctccgctaccccgagaggttgacacggggaactttctagggtacaattcccataatgggaaaatgcaccctaagttttggttaaaatgaaagggattcctcttccaaccattggttaataacaccctctagcgggcctgtgaagtgctgcaagcggtttatgatataagcccttgcatctgtatcggcctcttgtctggtgctatcctttttaagccctcggccttttaaacttctccacaccttgcgggagactctatcccacccggttacattaggaacagtctcaaccccaccactacaagccccagcgctatcgctgtgatcattgtcagtctgttgtgaaggttgctcaatctggctttctggttcaatagttggagctggagcgtttgatgtgcattcattggcggtttcctcggcggcagttggtacttcaggggtggcggtttcggttactacgggtaaatctctcactaggtagttatttgaggatcttctatccttcctactaacgtaaataaaacctagctttttcaactttgaaattgaggttgagatagttctgtttggaatattaagatcggatgagattctatctattccggggaaaacattaccgaaccctttggaatcctgccaccctttcaggtaggcataaacaaaacggtcagtaaggttaaattctttctgattacaaatttcataatccatgcggataaaagtattcatgttatttgctcctgtgaatttttcagcggggatattctccggggtggttagccccgttttactgcggattgttatttgcgtgtggaagcttgcttaaagattgttccaaactggccccagatttgccaagggaaagagattttaatttcccggtgactgttggtcaggaggatttcaaaatctttataccaatcaccatttgcaagcatgacgtcatattgtcccatcatgtgatccaagcgttgacccttgccgcgttttagcgagtctggaacaccattcggatatttactcttaatctttgagtattccacaatctcaggcaggaaacagaagtttttgccaaagataaagcgagcggcgcggcgcatatcggtaattttgaattcggttctcattggggcggtctccttaggctgcaatgccatgtttgtaaatagtcttaatgccagcctttgcggccttggcaaattccaacatttcaacgaatgaatcattatcgtgcatggtggcggatacaattccttgtcttaaatcttccaccgaataactgaataggctttcaggccctttagtcagtacatcgctaaccatcttctccaacacactagcgccgggaatatctttatcaatccctgaggtgtaaacggtgtcggatcccaactcaaagcggccagacactttaatgaatccgagctgttcaaggcttctagcctgcgctctaattgccatgatagaacacggcataatgtttagcaggtcataggggccaatctcttttttatcctcgatgatcttaagcattctataggctagttctgtcatggtaacgccacggtaaaacttataacctctaattcccttctttctcattacacagactcctttaagcgttcgaatgtttcttgatgaatgattgcctgattcaaaatgttctgagcgtctccaccttccatttcaaaactgtgaacctcaccattaataataagtgttacagctaccggcttttccccacctgctgtaaggtaaaataaagaggtacaacccgagccacctcccggagagtagcggaccggtttcttttccaacattaagcggcgggcgtatcggaattgctcacgggtccaacctagttccttttgcaagagagcttgattaacctctacacaggatccgtttgcacgttttgaaagggtatcgaacaggatttcgtattttttcattaggcggtttccttataagtgtttttgcagttctgcaatgtttaagacgatagagtaagaaggctctcccctgcgggccggtaaggttgcctcgaaggttgaagcattgcgacccacaagcagcgcaaggaaaagtttcaaatctgctttacttgattcacacaaggtgttagcatagcgttgttcatatgtaataatggcggctcctcatgcttggcctgttacaataacagaccctgtatatattttacagtacttttccacctttagcaaccattttctaaatgaaagtttgactattttttcaggtgtgctattctagagggtttcccacaggtggaggcgggacagatcccgacctgccattttggcaccctattagaatactctttactagaataaaacaaacacaacaaaaacaataacttaccgtaagtcattgtttttgctggtttgatcccaaaaaggaacacataaactagatctaaaaccttactcgctccgctcataagcttttatgtgttctaactcgttcgctacgctcactcctaagaacaaacaaaaccaaaaagaaaaaacctttaaaatcaatctattactcgccattgctcgtaatctcttgattttaaaggcaaaaaagaaaggagttccacagattgcgctaaagcgctttcccacaggtgttagatctttaggttttattgttttctcttttttttggtttgtttgtttttgtggtttttggtttgtctctttaggttctgtgtatgcctctctgagaggctcactctgtggcagagggtaacaccctcttactgtgggatagaggcttacagcctcgcctgtgtggctaagggagggtttaccctcccgcactgtggaacagccgagcactatgtgagaggcattatataggcgcgggggtgtgggcggtgtagaaagcaatacaagacaggaccactaaagaaactcatataaaggcctctgagagctttttaaggggtagcctatacgtttgggtgggtacactctcaaaacctcttataatggcttacagagcgttttagacatatacaccaaaatacaacccaccaacaacacatcaaaccaacccattacactagacagaaaaagaaatcaatagataatcaaagaaaaatttgacaatccacgtatatctgataaaatatatattgtggagtggggaactgcttcacacccggtttaataaaatcactattcccttgatatcgcgttttgcaagagcgcccaagctggggaaagagatcacgttagattgggacattctcctttgtgagtttagttgaaaatccggcttagtaacccggcacggtttggcggcttcagcaccgcgcaaatcttcaaggcgttaggggtggttcccgatgacgcgccttttttaagtattctccaatgaatgagagtatttaaagaaggatctcctaccttctgttattggtatacgctagtacctcctatagggcattcgcccggcttattattccgcccacccatggcggaatattcagcgttaagtctgtaagggtttctccctgtttcctttgcaggcttagcgatgaatccgcttaattcatctttcaaatttgatcatcaaatgttttctccgaaacattcccaaagttatccggtgaggccatcgccggatgctttttatcagcttctttttatcagtcgcttgtttacgcttggatcggttacttggcggtttcctcctgtggactcaggcgactaataaaaggcaactccttttgtctttgggtgtattaggttgttagtgtgctttccaagggcctctccgttttggtgaggcttcttttttgaatacctaattacaatccagcaaacgacaaaagaaacccgccacccgaatcacgtttacccgatgtgatatggatcctcgtatgcatacctaaaaataggagaggaaccagcaaaacccaatccattcaaaaaggagttatatccatgagcattaaacatgttggtactgagtatcaatcaatgcaggacgtgatcgcatattctgcggatcctgtattcagtcacaaagaagttgttattgatctgcctgacgcggttaagccgggttatatcctgaatgctgcaactggtaatttagcgcaagccgccgacacggatgtggttatttccgctgatgaccgtgaagccggttccgctgttcacctgattgttgtggatcgtggcaacgttttgaagcgtggcgcactgaaagcagccgatgccgcagcgactaccgcacaaatcgcagcaattgaaaaagccggtattaaccgcgtagccgtaaactaagggagattatatataatgagtaaggcattcgattttgataatcaggatatgtccgctgcgtttgaacagccagctgtggaaaaccacctgatcctagagttgggcgtatttggtaaagatacctctaccaccccaaaagctaccgttgattacaaactggatgatcaatccaagcttttcgcgaccacggaaagatacggaaccgactataactccactgaagttaaccgcgctaaatccttcaccttggatattccgcacattaccgccactggccgtgtaactgcaaaagacttccaaggccgtcgggcattcggttctaaagatgcaaccgaacaaatggcgggtttggtagccgctgaagctttccgccaacataaaagctatctgcgtaccaaggaaaaaatgctgtctgatgcgctgttctataaccgtgtgagcgataagcataccggtgatgtagattttgaacaggtgttcggtttcaaccagcaggcccaccagatcgccgctggtgcggctgataacccgctggaaaccatgagccgtgccgttaaagacatcaagcaagtttccgctggccgtcagattaaccgcatggttgccgtgtgtggttcggaattcttccatgctgttaagtataacccaaccattatgcagatgggctattacaaaaccgcacctgttattaacattgacggtaaagaaatctctccgggctatgagctgtttgatctggatggtgtaacctatatcgaatctaataaccctgattatcaggtagattctaagggtgctttcctgctgccagtatttaaacatgactcccgcttgggcgcatcgccattcatgactattgcaggccctgcaagccgtgatgcaatgttggcagatagcagcgttattcgcgagttctacgcctattccgtacaagataaactccacaacgttgaagtattctcagaagcttctctgttgccaatcgtttatcgtccggatttcgtcagcaaactgaccctgaaataataggccagattagctaattagattcgcgtcagataggggaggaataatcctcccccttcttttttgaggggttattatgaaagttgttgttttagatactgacgggcgcgtattgctcacaggtgatcagaatatgataaaccttacgccggtctgtaaagacttggggatctcccgagccactcttacttgtatggaaaagaaaaagtcgctagaggactctctcaaatactacattaagaaatccaagactagaacggttgcactgaaatgattatttttgcgcttattatgttcgccattgtttgctataaataaaaaggccctccgcatttggaagggccttttttgtttgcaatactctagatgtaacacattgagcgatacagcatgagctacaggctgtcacacaaagccacccagcccaaaacatcgataacataacttgttgcttttattaaaaattaattttagatattgcgccttcacaggcgtcggggggataccgccgtggccaaccgccaccacggtcataatacgtttatcaggatcgaaccgcgtattatacaggctttctaaggtgttgaaacccactttatcggcggtggcccccacaggcggcgttcacggcgccaaaaaatcctccactgcccacagcaccgcgtcaggccgttccagaataccgaggtgagtgcgggcctcccctagacgcaccacggagaaaaacggctgctcggcggcaaatgcctgctgttgccgcaaatagtcgtcgcggcgatccaacgagtagatgtgccggcacggcggcggcgcgctcatgcccgccaggcgttgcagcggcgagccgaattgccggtaggcctgttcgatggccaccccggcggcacgccaaagccggtaatcttcctgcgccatctcgacctccagatggcgtttgacccgatcgtggcggatgccgccctgccaaaagtcgaacaaggcgtcgcgtgccgccagccactgctgcggctgctgcatgcggctcaccgccgtaaagaacgccggctccggctgcgtcatgatccagtcgagaaacaccatgccccgtacccgttgcggcaacgcttcggccaacgctaccgccagccagctggcgtgcgccaccgacagagtgaccgcgttatccaaacgcagcgccgtcagcagttggcgcacatcctccagcaagtcgtccgccgtcagcgacatctccgtggcttttgacgacaggccatggccgcgccagtcgatgctgatcacccgatagcgttcggccgccagagcgatgaacggctcaaacacggttttcggttcgcaccagccgggcagcaacaccaacgtgagcggccctgagccgacatcctgatagtcgagtatcatgttggcactgtgaaatgcggtcatattacctcctgcgcgtctctccccgacccgttcggggaataccgacggggataaggtgacagcgcagcaggtattgatctattgaagttcgtgcggaaagccccctgggcgcaccttatgaaaaaatgcgcactaattggaatgggaaattaatggcgcacgcagggataggcggcacttaacgccagcatgatcaccgacggtgcggaataatgcagttgctcaggatgctcgttcaaatactgcatcaccgcgtcggcggctacgccgatgctcatcccggcttccgggcagatattgcggttgccctgcatggaataagtatcgaatacgccggcgacgtatcccatgaacatgccgccattcagcgcttcggccacggtggcttcaccgcttttattttttacgtaaccgctggattccgccagcagaccactgcccgaataaaaccccgcatttgccattgaggaaaataataaggccgctaaaaaagaaacctgtttaatcattgctgcgcatcctgcccattatcaattctgaagtcttcaagaatagcggctttcacgcgaaatagcgtcgcttcagccgattttcagacaatgggcaaggtggcaacaattgacatcaacggaaaggcgccgcgtcgcccgccccctcacgcaccacttccggcgaggattcggtcagatcgatcaccgtggtcggctgttggccaaggaagccgccgtggatcaccagatcgaccaccttgcccaaatgatcgttgatctcttccggatcggactcggcaaaatcattgcccggcagcatcagggtggtggacatcatcggttcgttcagcgcctccagcagcgccaatgcgatcgggttcgacggcacacgcaggccgatggttttgcgcttttcattcatcaggcggcgcggcacttctttggtcgctttcagaatgaaggtgtagttgcccggcgtattgtttttaatcaggcggaacgccgtattatcgacgtgcgcataagtcgacaactcggacagatcgcggcacatcagggtgaaattgtggttgccgtccaactgacggatgcggcaaatgcgttccatcgccgccttttcttccagcatacagcccagcgcgtagccggaatcggtgggataaacgatcaccccgcccttgcgcagcacctcaaccgcctggttaatcaaacgcggctgtgggttgtccgggtgaatataaaaaagctgactcatgacttgctcctaaaatgatgcccgcgcgcgttgccacgcgcgaaaaatcagaccgcctcgccaggctgcggccaatcgcgccacaccggctcgaccccgcccggcagccacagtttgcggcccagttcgatccacgaacaaggctgatgaaaatcagatccttgcgaggccaacaggcggtagtcctgggcgtatttcgccaactgcgagcgctcatgcggcgcctgctgacactgcgccacttccatggcgtcgccgccgtgttcggcgaaatgcgccagcaaacgtttcaaccacttcgcggtcagatcgtaacggccgggatgcgctatcaccgcctggccgcccgattgatgaatcgcatcaatggcttgttctattgtacaccactgcggcggcacgtagccggttttgcctttggccagatatttcttgaacacctgcgccatgttgtccgccacgccaatctccaccaggtaacgggcgaaatggccgcgggtcaccgcaccggcccccgccaaccgctgggcgccggcataggcgtcgggaatgcgcgctttacccagacgcgcgccgatctcctgtgcccgccggttgcgacgttcggtttgttccgccaatagcgccaccagcgccgggtgcgcgacgtccatgcccaacccaacgatatgaatttcatggttctcccacagcgtcgagatttccaccccgttgaccagccgcagcggcaacgcctgctccgcaatggcggcggcggcctcagccaagcctgcggtggtgtcgtgatcggtgatcgccagcacgcccacgcgcatctctaccgcccgcagcaccagctgcgtcggcgtcagatagccgtcggaggcggtcgtgtggctgtggagatcgtacagagtaaaagcggtggatggggggttactgtctgtcaaaacggctatccggcaatggcttggctttctatcatacccgcgatcggcggccggacggaaatctattctgcgccaggcagacgatgaatagaattcacgctgatcgctaaaacattgtgcaaaaagagggttgactttgccttcgcgaaccagttaactagtacacaagttcacggcaacggccgtgtcggatgagagttaacaaagagagtctgcaaatgaacacatacatttctcttcacggttggtggcgtacctccctcttgcgggcggtgtaatcgcgcatagctgtcatctgacaatgcagatttcctgagcccgcacctgatgcgggcttttttatggacagaattcactggaaccaccgatgatgaacaccaaaccacaactgacattgctgaaggcgcaagccagctaccggggcgatcccaccacccttttccaccagctgtgcggcgcccgtccggccaccctgctgctggagtcggcggaaatcaacagcaaacagaatctgcagagcctgctggtgatcgacagcgcgctgcgcattaccgcactgggccacaccgtcagcgtgcaggcgctcaccgccaacggcgcggcgctgctgccgctgctggacgaagcgctgccgcccgaggtgcgcaatcaggcacgccctaacggccgcgagctgaccttcccggcgatcgacgaggtgcaggacgaagacgcgcgcctgcgctccctgtcggtgttcgacgcactgcgcacactgctgacgctggtggactccccggcggacgagcgcgaagccgtgatgctgggcggcctgttcgcctatgatttggtcgccggttttgaaaacctgccggcgctgcgccaggatcaacgctgcccggacttctgcttctatctggcggaaaccctgctggtgctggatcatcaacgcggctcggcccgtctgcaggccagcgtcttcagtgagcaggcgagtgaagcgcagcgtttgcagcaccgcctggaacagctgcaggctgagttgcaacaacccccgcagccaatcccgcaccaaacgctggaaaacatgcagctgagctgtaaccagagcgacgaagagtacggcgcggtggtcagcgagctgcaggaagcgatccgccagggcgagattttccaggtggtgccgtcgcgccgcttcaccctgccgtgcccggcgccgctggcggcctaccaaacgttgaaagacaacaaccccagcccgtacatgttcttcatgcaggatgatgacttcaccctgttcggcgcttcgccggagagcgcgctgaaatacgacgcgggcaatcgccaaatcgaaatctacccgatcgccggcactcgcccacgcggccgccgcgccgatgggtcgctggatttggatctcgacagccgcatcgagctggaaatgcgcaccgaccacaaagagctggccgagcacttgatgctggtcgatctggcgcgcaacgatctggcgcgcatctgccaggccggcagccgctacgtggccgacctgaccaaagtggatcgctattcattcgtcatgcacctggtttcccgcgtggtgggcaccctgcgcgccgatctcgacgtgctgcacgcctaccaggcctgcatgaacatgggcaccctcagcggcgcgccgaaagtgcgggcgatgcagctgatcgccgcctccgaaggcacgcgccgcggcagctacggcggcgcagtgggctacttcaccgccaccggcgatctggatacctgcatcgtcattcgctccgcctacgttgaagatggcatcgccaccgtgcaagccggcgccggcgtggtgctggattccgtcccgcaggcggaagccgacgaaacccgtaataaagcccgtgccgtgctgcgcgccatcgccactgcgcaccatgccaaggaggtgttctgatggccgatatcctgctgctcgacaacgtcgactcctttacctacaacctggtcgatcagctgcgcgccagcggccaccaggtggtgatttaccgtaatcagatcgccgccgaggtgatcatcgagcgtctgcaacagatggaacagccggtgctgatgctgtcgcccggccctggcgccccttccgaagcgggctgtatgccggaactgctgcagcgtctgcgcggccaactgccgatcatcggcatctgcctcggccaccaggcgatcgtcgaagcctatggcggccaggtcggccaggcgggcgagatcctgcacggcaaagcctcggcgatcgctcacgatggcgaaggcatgttcgccggcatggccaatccgctgccagtggcgcgctaccactcgctggtcggcagcaatatcccggccgatctcaccgtcaacgcccgtttcggcgaaatggtgatggcggtgcgcgacgaccgccgccgcgtgtgcggcttccagttccacccggaatcgattctgaccacccacggcgcgcgcctgcttgagcagaccctggcctgggcgctggcgaagtaatataaggaacacgacgatgcaacctattcttgagaaactgtaccgcgccgagtcgatgagccagcaggaaagccaacagctgttcagcgccatcgtgcgcggcgagctggagccgagccaactggcggcggcgttgatcagcatgaaagtccgcggcgagcgcccggaagagatcgccggcgccgccaaagcgctgctggacgacgctcagccgttcccgcgccctgactatctgttcgccgatatcgtcggcaccggcggcgacggcaccaacagcatcaatatttccaccgccagcgccttcgtggcggcggcgtgcggcgcgaagatcgccaaacacggcaaccgcagcgtctctagccgttccggctcttcggatctgctggcggcgttcggtatccgtctggatctgccggcggaagaggcgcgcaaggcgttggacgatcttggcgtgtgcttcctgttcgcgccgcagtaccacaccggttttcgtcacgccatgccggtgcgccagcagctgaaaacccgcacactgttcaacgtgctgggcccgctgatcaacccggcgcgcccgccgctggcgctgatcggcgtttacagcccggaactggtgctgccgattgccgaaaccctgcgcgtgctgggttatcagcgtgcggcggtggttcacggcggcggcatggacgaggtggcgatccacgccccgacgcacgtggcggaattgaacaacggcgaaatcagtagctaccagctcacgccgcagtccttcggattggaaacctatccgctggaagccttgctgggcggtacgccggaagaaaaccgtgacattttggcgcggctgttacaaggtaaaggcgagccggcgcacgccgcggcggtcgcggccaacgtcgcgttgcttctgaagttattcggacatgaagacctgcgccaaaatgcgcggcaggcactggatatgatcaacagcgggcaggcctatgagcgtgtcatcgcactggcggcaagaggataaatgatgcaggaaaccgtgctacacaagattgtccgcgacaaagcgcaatggatcgcggcgcgacaacagcaacagcccctggccggctttcagaacgacatcgtgccgagcgaacgcagcttttatcacgcgctgcagggcacccggacggctttcattctcgaatgcaagaaggcctcgccttccaaagggctgattcgcgaaaactttgatccggtagaaatcgccacggtgtataaagatttcgcctcggcgatctcggtgctgaccgacgagaaatacttccagggcagcttcgatttcctgccgctggtcagtaaaaccgtcagccaaccggtgttgtgcaaagactttatcatcgatccgtatcagatttacctggcgcgctactatcaggccgatgccatcctgctgatgctgtcggtgttgaccgacgaccagtatcgccagctggcggcggtagcccacagcctgaatatgggcgtgctgaccgaagtgatcagtgaagaagaactgcagcgcgcgatcgcgctggaagcgcgcgtggtcggcatcaacaaccgcgatctgcgcgatctgagcatcgatctgaaccgcacccgccagctggcgccgcgcgtgccgcatggcgtgacggtgatcagcgagtcaggcatcaacagctatgggcagatccgcgaactgagccattacgccaacggcttcctgatcggcagcgcgctgatgtcggaacccgatctgcgcgccgccgtgcgccgcgtgatcctcggcgacaacaaagtatgcggcctgacccgtccgcaggacgccgccgccgcctatcaggccggcgccatctacggcgggctaatcttcgtcggccgttcgccgcgctatgtggacatcacccgcgcccgcgaagtgatctccggcgcgccgctgaagtatgtcggcgtgttctgcgacgcccagctcgataccgtggcgttgaccgttgagcgcctcgggctgcatgcggtgcaactgcacgacgcggaagaccaggcctatatcagcgccctgcgcgcccgtttgccggccgattgccgcatctggaaagcgctgagcgtgaaagatcgggtgccggcgcgcgatctgcagcatgtcgatcgctatctgctcgacaacggcgccggcggcaccggccaacgcttcgactggtcggtattgcaaggcgaagatctgactaacgtgatgctggcgggcggcctgcgcgccgacaactgcgtcgaagcggccaagctcggctgcgccgggctggacttcaactccggcgtggaaagcgaaccgggcatcaaagatcccgcgcgcctggcctcggtcttccagaccctgcgcgcctactgaatacggctctatattaataacggataataacgggaactctcatgacgctgcttaacccctacttcggcgaatttggtggccaatacgtgccgcaaattctgatgccggccctgaaacaactggaagaagcctttgtcagcgcccagcgcgatccggcgtttcaggcggaatttatcgatctgttgaagaactacgcgggccgcccgacggcgctgacgctgtgcaaaaacctcactgccggcagcaacaccaagctttatctgaagcgtgaagacctgctgcacggcggcgcacacaagaccaaccaggtgctgggtcaggccttgctggccaagcgcatgggcaaaaccgagatcatcgcggaaaccggcgccggccaacacggcgtcgcgtcggcgctggcctgcgcgctgctcggcctgaaatgccgcatctatatgggcgccaaagacgttgagcgccagtcgccgaacgtcttccgcatgcggctgatgggcgcggaagtgatcccggtgcacagcggctccgctacgctgaaagacgcctgcaacgaagcgctgcgcgactggtccggcagctatgaaaccgcccactatatgctcggcaccgccgccggcccgcacccgtaccccaccatcgtgcgtgaattccagcgcatgatcggcgaagaaaccaaagcgcaggtgctggagcgcgaaggccgcctgccggatgccgtcatcgcctgcgtcggcggcggctccaacgccatcggcatgttcgccgattttatcgatgacgccgaagtgggtctgatcggcgtggaacccgccggtctgggcatcgaaaccggtcagcacggcgcgccgctcaagcatggccacgtcggcatctacttcggcatgaaagcgccgatgatgcagaccgccgaaggccagattgaagaatcctattcaatctccgccgggttggacttcccgtccgtcgggccgcagcacgccttcctgaacagtatcggccgcgccgaatacgtgtcgatcaccgacgacgaagcgctggaagcgttcaaggcactgtcgcgccatgaaggcatcatcccggcgctggaatcctcacacgccctggcgcacgcgctgaaaatgatccgtgaaacgccgcagaaagaacagatcctggtggtcaacctgtccggccgcggcgacaaagacatatttaccgttcacgacattttgaaagcacggggagaaatctgatggaacgttatcagcaactgttcaaacgcctggaaagcaacaaggaaggcgccttcgtcccgttcgtgacgctgggcgatcctaatccgacgctgtcgctgcagattatcgacaccctgatcgaagccggcgcggacgcgctggagctgggcatccccttctccgatccgctggcggatggcccaaccatccagagcgcgacgctgcgcgctttcgccgccggcgtcacgccaacccagtgcttcgagatgctggcggccatccgccagaagcacccgaccattcccatcggcctgctgatgtacgctaatctggtgttccataaaggcatcgatgcgttttaccaacgctgcgccgaagtgggcgtggattcggtgctggtcgccgacgtgccgtttgaagagtctgcgccgttccgcgccgccgccgctcgtcacggtatcgcacccatcttcatctgcccgccgaacgccgatgacgatctgctgcgcgaaatcgcttcgcacggccgcggctatacctacctgctgtcgcgcgccggcgtcaccggcaccgaaagccgggcgcagctgccgctgcatcacctggtgaacaagctgcgcgagtatcacgccgcgccgccgctgcagggcttcggcatctccgagcccgagcaggtgaaggccgcgctgcaggccggggccgccggcgcgatctccggctcggccatcgtcaaaatcatcgaacagcaccatgccaacccgacggagatgctgaccaggctggcggccttcgtcagcaatatgaagcgcgccacccgggcgtgatcctctccagcgagcgccccgccggcgctcgctttaacagcttgtttcccctcaaagtttgttccatttatttacagcaaaaatttgaacaaacgcaggtcttgtctcacaatgaactttgttcgctatgcatttcttcgtttgatttggggaatgcgctcgctgcggcgaaaaaccgtacgagtttcaaccataacattgcatggagagtaatttatgaagctttttaaaaccctttcggccttgtgcatggccgccgttgtggcggtcgcggtgagcgcttgcgcgccgacggcgaaatctgagggaacgggcggttatatcgatgacacggtgatcaccaccaaagtgaaatcggcactgctggcggataaaaacatcaagtcacgtgagatcagcgtggaaacctttaaagggcgcgttcagctgagcggtttcgtgacgtccagcgatgacgccaatcgtgcggtgcaggtcactcgcggcgttgccggcgtgaaatctgttgaaaacgtgatgcaacttaaataataccgacacagggaggcgcaacgcctccctgtttgtggccttcatcagaagcggtaacccgccccgaacatgaacacccacggatccagacgcgtatcgaagctgtggtgcccaccgttcgcatcgttgaagcgagttttggtttcgatgttcatccaccacaccgacatgttcagcatccagtgctcatccaggttgtaatccaggccggcctgcgccgccacgccccaggaatctttcagatcgaggttgctcaacccggcgcttttgccgtagtcattgaacttctcgtcaaagaaagtggtgtagttaacgccgacgcccaggtaaggacgcagcttatcctgcttgtcgccgaaatagtattgcgccatcagcgtaggcggcagttggtgaacggtcgccaaatcagtgccgcccagcgtaaccttgtggcggaatggcgtcgcggccaacaactcaacgccgatgttgtccgtcaccatgtaaccgaaggtcagaccgagctgggtgttgtttttcgcatccagcgaacccaaccccaacacgttgtccgaacctgcatttggacgcaccgtcgcggtgcccgcgcggaacaggaaatcaccggcctgatgcgcacttgccaacataggcgccatcatcgtcgccaataccatcagagttgtctttttcattatccattccatttgtgtggttaatcgctcgagggggaatatacctactttcgggtatttgtgatcccatcgagatcacatcttatgtgtaaaaatttaaaatcccactaaaaacaaggttacctaaccgtctaataaatcaaggattgatctgcatcaaaaaatcgattttgttgcaaattatctacatgttcaaatttctgttgcggagaaaaatgcggctgaggtaatttcattttccgtgttggttttggttggtgccgtgaggagtcggtgggcaatcaagatgagcgaaatccttaatccctgtgtcagctgcggcgcatgctgcggttattttcgagtgtcattctattgggccgaagccgaagacggcggcggcaccgttcccctttccttaacagagcctttgaccccgttcctgcgctgcatgcaggggaccaacagcaagtccccccgctgcagcgcgctggacggtgaaataggtaaagccgtttcctgctcgatctaccttaatcggcccagcccgtgcagggagttcgatcagtccggtgaaaacggcctgcgcaacgaagcctgcgatcgcgcccgcgaacgctacggcctgccgccgttgccggtgaccttgccgctttcgctgcctgagacgacgatcgttgaagaaataggcgtagtgcaattcgcggggtgccacagcggcgtggaacagggtacaatcacccactgatttatctctgttttcccgacgccaaggagtctgcatgcctatcacggccaacgctttgtaccgtgacagttttaactttttacgcaaccaactggccagcatcctgatgctggcgctgttgacggcgtttatctccgtgctgctgaatcaggccttcagccctgatgccgaacagttggcgacgctcgctgccaccaccagcgatttcgcctcgtctaccggcatgggcattcaggaagtgatccagcagatgacgccggaacagcagatggtgttgctgaaagtgtcggcggccgccaccttctctgcgctggtcggcaacgtgctgctggtcggcgggatgctgacgctgatccgtctggtgtcgcaagggcaacgcaccagcgccctgcgcgcgctcggcgcctcggcgcccgacttgccgcgcctgctgctgctgctgtttatctgcaccctgctgatccagctcggcctgacgctgtttgtggtgccgggcgtgctgatggctatcgccttcgcgctggcgccggtgatcgcctccgtcgataaaaaaggcgtgttcgcttcgctcaagctgagcagcaaattggccttcgccaatgcgcgcgtgattgtgccggcgatgatgctgtggctggcggctaagctgctggtgctgttcctggtgagccatctgtcggtgctgacgccgaacgtcgccagcgtggtgctgaccgcgttgagcaacctggtctccgccctgctgctgatctacctgttccggctgtatatgctgctgcgcggctaacgccggcgtaagcaaaaaccaaggggcacgcttcggcgcgccccttttttgtttaccccaccacggcggcttccgcctgctccttactctgaatcagcttcagcgccaggtacagatccggcaccaaaatcaactctttatcgcgtcctaagcggttgatgcggaaccaacgcgtcagttcggtgcgacgccccgccagcaccagccttacgttacgctgtaacagatcgcgtttcagttcatcgatggccgccagcacgctgatatcggcatgggtaaaactggccaccgcatccaccaccacccaacgtggctggaacggcgtgccgtcgaccaaattgaggatacggcgtttgaaatacgccacgttgaaataggtcagcggcgaattgaagcgatacatcatgacgccaggtaccgccttcaccccattgttattgcccatggaatggatcataccttcatcgttgacgcccagcagttgttccgtcggccggaagacggtgcgcagaaactgcatcagccccagcaacaccgccagcccgatgccgctgatcacgcccaccagcagcacgctgaggaaggtaaacagcgccaagcggaacgcctgcgcgttgcgacggcgcaagatccagataccgcggatgtccagcagcgaccaggccgcatacatcagcaccacacccaatcccgccacaggaataaactgcagcggcgccatcaggaacagcaagacaaaggcgatgacagcggcggcgatgatcgacaccaactggctcttgccgccgttggcgtcattcaccgcggtgcgagaatctgcgccgctgatggcgaaaccttgcgacagcgcagagacgatattcaccagtcccagcgcgcgaaactcagcgtcagcgttcacctcataaccgtttttggcggcgaagctgcgggcggtgagcatcatgctgacaaagctcacgaccgccaggttaagcgccgggatcaccatatcgcgcagcaaaccaggctggaagtccggccactggacgatcggcagcacgccgctgaaaccgcccaccgtcaccacgccatgctgctgcaggccgcccgcccaggtcacgaacgccgccagcacgatagcgaacagcggcgccggccaattaggccgccattttttaaatccaagcagcgtcaccagcgtcaacaacgacaccgccatcgtcagccagtcgctgtgcagcaggttaccgggcagcgcgtagatgcgctcgatcaactgtgccgggcgcatcgtaaaccccaacaccttgccaatctgatcgacgataatggtgatcgccaccccgttcagcagcccgctgaggatcggccgcgacagcagatccgccagcgcccccagcttgaaccggctggccagcaggcaccaaccgcccatcatggcggtcatcatgatggtcaattgccaatggcgttccatattgcccgccgccagtggcgtcaccaccgcggcgatcaccgcacaggtggcggcatcgggcccgacgatcagctggcgtgacgagccgaacagcgcataggccaccatcggcaagacgcaggaatagagccccaccaccgggctggccccggccaactctgcgtaggcgatagccaccggcaacgccacggcggcgacggaaagaccggcgcgaatatccggcttgagccagctgcgttgatagcccaataaatgcgtcaaaccaggcgtcagggcctggagagatttccactgcatgctgttttccgcggtaaattatctggttattatgacgcttactatgcggcctgcggcccgcgctggcaatgcgcccgcgctttcttgcgtaagtttatgcaaattcctgctttcgcggcagaaatccgccggccaaacgccgataatcggcaacgcccggcggtacacagagctcgccgaatccggtatagtcggccgatgaacagatgatggattgatttatgaagcagtttcttgatttcctcccgctaattgtctttttcgctttttacaagctgtacgacatttacgtcgcttccggcgcattgattgtcgccaccgcgctggcgctggtgttcacctgggtgaaataccgcaaggtcgagaagatgacgctgatcaccttcctgatggtgctggtgttcggcaccctgacgctggtgttccacaacgatttgttcatcaaatggaaggtcacggtgatttacgcgctgttcgcgctggcgctgctgatcagccaatgggtgctcaaaaaaccgctggttcagcgcatgctgggtaaagagctgacgctgccggacaaagtgtggagcaaccttaacctggcctgggcggtcttcttcctggcctgcggcctggcgaatatctatgtcgccttctggctgccgcaaagcgtctgggtcaatttcaaagtctttggcctgacggtgctgacattggtcttcaccctcctcagcggtatctatatttaccggcacatgccggaagaacagaaaaaatagttacaaaattgttaatgcctgcggcgcttgccgcgggcagtatgatgttattccctccttttaaaagcagactgctatgacacaacaacgacctttacccagcggcgagctggtgctgcgcacgctggcgatgccggccgataccaatgccaacggtgatatcttcggcggctggctgatgtcgcaaatggacatcggcggcgccatccaggcaaaagagatcgccgaagggcgcgtagtgacggtacgcgtagacggcatgaccttcctgaaaccggtggcggtaggcgacgtggtttgctgctatgcgcactgcatccgcaccggacgcagctcgatcaccatcaatatcgaagtgtgggtcaaaaaagtctcttccgccccgatcggccagcgctaccgggcgaccgaagcggtgttcacctatgtggcggtcgatgcggaaggcaactcgcgcgcgctgcctgagggcaaaatgaatttccgcgtcggcttcgaagaataaactgacgctacactgcaaatgcaaaaagggtcgccgaggcgaccctttctttttggtatgaccaaactcagttcaattcggtggtgccgttcaacttgaagcggatagtgacggtgcgatctttcgcttctttggcttcatagcgccatttgcgcatcgcctgcttcacttcacgttcaaacatgttgcgcggttcggccgacaagatacgcacgttgctgacgcgcccgtcgctgtcgatatcaaactgcacccgcacgctgccttcgatctgtaaagcctgggcccgcggcggatagagcggattggcgcggctgatcggccttgggccgagctcgcgcgagttgccctgcaccggcgcggcaggcgcctgtttcaccggcgctttgtcgatcggcttggccggcgagtcgttgttgaacggcgacggttcgcgcggctcgacttttttcggctccggtttcacctgtttttcgaccttcggcttcggcttgggtttcggtttcggcttgaccggctccggcttcacaatcgccttcggcggcggctccacaataggttccggttctggctccggctcaggttcgacctgcggcggctccggttcggcctgtgccggcggcggcggttcggccatcgcggcggtattgaccatcatgacgctgatcggcgcgtcctctggcttcggcagctccaccacttcttttaccgaagcgtaaagcaatcccgccaccagggcgctgtgaaggcctacggacaagacgaaaggcacggatatacggcgattaaggaacatcttttttagcggcataatgattctgtttcctctggttcgccaagtttaaatgcaaatagcaatcatattcaataacgaaaggcaaactatcgctttaatcgtcagtatgcgcggcgaaaaccagcaaactcataaggatattaacctggccgttgtttttttaccgccggggcgacacgctttattaacgtctggccaggcgtcaaaaagtaaaaaacccgccggagcgggttaatttcggtgagtcagcgttattcttcatcgccatagtaaagcacgcccagcttgatcagcggccgcccttgcgccttacggtgcaggttggtgtcgcgcagcgaatagacgcagccgcagtattcctgctgatagaagcgttcgcgcttgctgatctctatcatgcgcgacgaaccgcccttcttgcgccagttgtaatcccagtacaccagatcggggtacttttccgccgcacggatgccgcagtcggtgatctgctgcatgttcttccagcgcgagatgcccagcgagctggagatagtgtcgtaaccatgctcatgcgcatacagcgccgtgcgctcgaaacgcatatcaaaacacatggtgcaacgaatgccgcgctccggctcattctccatccccttggcgcgggcgaaccagttgtcggtgtcgtaatcggcatcgataatcggcaccccgtgctgctcagcgaaacggatgttctcttctttacgcagcagatactctttttgcgggtgaatgttggggttatagaagaaaatggcatactcgatcccggaggcctgaatcgcttccatcacctcgccggaacagggcgcgcagcacgaatgcagcagcagtttgtttttgcccgccggcaaatcgagtttttcccttaccagttccgtcatgtcctcacctcaatggcatatcagtttaagcgcgccgcactatacgaataaaaagtagcggcttcaaggcataagcgccaatccgccgggaaattcgccctatgccgttcccctgccgcgccttttgcgctaccttggtagcaccgttttatagccatgattttaaaggtgaaacatgctttatctgatctacgcgcaagacgtccccaattcgctggaaaaccgtctggcggtgcgcccggcacacctggcgcgcctgcaggcgctgcgcgacgccggccgtctggtggtcgccggccctaacccggccatcgacagcaacgatcccggcgccgccggctttaccggttcgacggtgatcgccgaattcgcctcgttggcggaagcccaggcctgggcgcagcaggatccctatatcgccgccggcgtctacgccgacgtgacggtgaaaccgttcaaacaggtattctgacctcattagctgaccgggagcggcgcaccgttcccggatcaatgcgtgctctcgcccgctcccgtcggtagaaaaaatgccttccctccaggggctgtcgcaccgcccgcctatactctcctgaaccagcggcatcgccgcgtactccgggagatcgaccgatgcgactcgatgttcacgctcacctgtggagcactgagtatctggatcttttgcaatctcatggcctgcacgaagtcgccgcctatcggcaattgggcgccggccgcagcgatcgcgagctggcagcccgcttcgctctgctggacagcgccggcatcgacatgcaaatcttgtcggcgacgccgctgtcgccgcacctggaagacgagcaggcggccgttgatgccgcgcgccggatcaacgatgaatatgcggagctggcagcgcgttatcccgcccgcttccgggccatcgcttccttgccgctgccgcatatcgacgctgcgttacgcgagctggacagagccttgacccagctcggcatgctgggcgcgtgtatcaccacctcggtgctcgggctgtctatcgccaacccactgttcgagccgctctatcaggaactcaaccatcgccgcagcgtgctggccattcatcccgctggccgcggcgcgcactcgccgctcatcgccgattacgctttaacctggtcgatcggcgcgccgatcgaagacacggtcgccgccatgcactttatcctcaacggcatcccccaacgctttgcggaaatgaaaatcattgtgccacacctgggcggcctgctgccgatgacactggaacgcctcgaccaaaccgtcgcgtgggaagcgccgaatacgccggaacccccgagccgcgccgccctgcgcatgtggtacgacacggtaggccacgatcaggtgcccgcgttgcaagcggcggcagcgacgttcggcacagagcggctgttgttcggcaccgatttcccgttccagccgggcgaactgtttcaaaccacggtggactacgtccggcgcgcgggattgccggaggaagacgtgaacgccattttggatcgcaatgcggctgcgctgtttgggctgggtgcggactgaagatccgtcctcattcagtaacgggcaggagactccattccggccccggatttcggttagctcaagtgggctttatacggttctttcacgttgtgcttcacgcaggacagcgacagccgcgcaaaacgctgcgtcctcaatgtcgcacatcccccgtaataacgggatgtgcgacatgtcgtgaaccggtcaatgttgggaaactgcgtcagacctgtcgcaggtaaacatccgtaatgcgcaggtcaaagttgcttttcatttcggtgacgtcaataagcaagaaagcgtgcgtagcccagtccggcgctcgctcgaaggcgggaggctgcgtaggataaccctgcatttggcctgggatgataacgctcttcagatcggattcattgccgctaaattgataggtgtaaacgtgaccggtttgctgcttgagaatttggggttccacgtcttgttgcggaccatattcgcgcagcttcgcccataggattttgacctggcagcgttgcccatcacccgcgtaagtgttggcgcgaacatggtgaataacgctgccgtaacctttcaggctgatggttcccagcaccgcctggaacacaccattaccagcggccgcgttgcgccccaatgaaacgaaaccggcctggcgaataaggctgaaattggtgctgttagtcgtaccccacccgtagcgagatttgcgtaccgtattaacgcctcccggcggcagaacccaaacttcctcagtccatttgtcgctaccgttgctatacgtcgtgccatccagccaattgtcctgtacggcggtatcggttcgcacctgagttaacagataaggccaggcgataggcaattgcgtattacgcaaagagacagagcccgtgccatcaatccaaccactgacgttggagtcaccaccttgttgcatctgaccgatattgaccttatcaaagaccactcgcgccaaatcacccacatagaatgggttagaggttgtcggataggccgttgggctaccgccggctttgaaggtaaacagaccgccgataacgttgactttgcaacttttggcatccgggatgttcaggatataattttgcgggccatagccttcaacgtgacaatcgcggaaaatatgttgccccccctcgatatgcatatactttccgacatggctggaggaggtttgcggcccgtttttaccataaatgtaatcgaaggaacagttgaagaaatagctgtagcccccctgtaatttcacaccgcaattgctctgagcgaaaatgcagctgtggaaattcatttcttcaccggagttggaagtattgtcggggaagtaatagcaaatgtcgcagtgattgaaactaaagccatacatgcgcaggaagtagaaatcggtagtgccggttatgccataggcaaaaccttcgatcccacccccgataaaggtcaacgaattgcgaccatagctagccgagagcgaagtagaaaacgtcatgccatcgacaaatgaattggcaccagggccaatcatacgcaaatttttcacgctgagattgccctgggtataaccggcgttgttttgccattgaatcgcgattttacgttcggtggcgttgccctgtgtcatggcgctaaaatccagcaaggcgccggagaaatcgtaatcgacggttttcaaatccagcttcagcgtttccgtacatttaaattgcccgctcccgaactgcagattcccgtttttcaatacgcgtgaaccgctggatacagcctgcgaactggcgtaatcgtgagcagcttgaatggcagcggcatcctctgaaataccgtcacctttcgcaccgaacatataaggcgacaccgtgccggcaacgtccaggacgcgcacccacaaccaagcggcgttggggcggatgaacatcccgccatcatccatcggtgtcgattgtgctttggcgacgaagataccgccgccgagaggctgacgattgccggcattccaatcgccgtaatatgcggtcacagcgatcaattcgccgactgcgccaggaagagtgtttcgtaacgtagcgatatcagggcaggtattcatcatattatcctcatagagttactgtatttatatacagccatataactctatgaacgaatgaaccgtgcatcaatagcgggagtgttgttctattgcccaccgaacataccggtctattggatggcctccttctgctccttttatcccctccatacaaggcagagacatgccgttacgcgacgagttttcctcgcaccaccaccttgcccggcttgatctcggggtcggcaatacgacggatcgccagattcaacgcttgccaggcgatctcttgcaagtcgtgtgacacgcacgggaaatgaaaaccgtagatctcggcatgtgaaacctcatcgatgctgaacagcgacacctcctgcatcaacggcagccgatattcgatgcaggccttgatgatgcccagagagatctggttattgcagccaacgaaaaagtccggggcacggtgattggccagctaacggctcgtctcttgccaggcgacgcccatcataaagaaactgttgttcggcaccgattttccattccagccgggcgaactgtttcaaaccacggtcgacgacatccggcgagcgggtttgccggaggaagacgtgaatgccattttggatcgcaatgcggctgtgctgtttgggttgcagaatgtgaagcggcccacataggtttggccgcgtttacggcacgatgtgttcaccgctctgaaaatactcaccgatgacgctttccagcaccgccaccgccggttggctggcggccgcggcagaacggagcagttgcacttcgtgtggtgtgaccgacggcaattcgtcgagtatccgcatcgccgccgaaacccgtgcgcggtcgagcagcgtgacggccaatcctgcctcgacggcagccgccaccacgctggccgaagggctgctcacaaccactcgccaacgccttcccgccctggtcaatgcatcgatcatagcctcacgataagggcaatcggcggcatgcaacgccagcggcagtggccggttagcctgcagcgccagcgaacggcctccggcccacaccggcgcagtcaccgcgagcggtgtctggcacggtttccccgagggttgaaccaccagcgcgagatgcagccgattacggccaacttgttccgccagcgcctgactggcagcggtagagacctccagttccaccgcgggaaaactgtcggcaaaccgcggcaaaatatggcgtatcacatgggaagcgtactcatcaggcaaccccaatttgatatggccgcttagcggcgcgccccgcagttcccgcagaatatcatcatgggcgctcaacagcccgagcgtcgaagccagcagcttgttgcccagcggcgtcaacgccacggactgattgtcacgctccagcaagcggccgcccgccacctgttccaggcgccggatatgcacgctcacggcggcggggctgcgattgacaaatgccgccgccgcgcgaaattgccccaaacgcgcaatagcgtgaaaagtgcgcaagagatcgatatccaatgtcggccgcatgatttaactccattaaacaactgaacgaaaattattcgatttattaaattatagccactcactaccatcgggcgtaaaggaggtgaccatcatgtccctgtcaccatttcgcccctcttcccaccgaggcaaagccgccctctggctggctgcggccgaggtcctgctgatcgtggcctggagctccggcttcgtcggcatccgcttcgccgccgatcacgcgccggtgttgctggtggcgttctggcgctgcgtggtggtcgcgttcgcgttgctgccgcttagtgtgcgtgccatcaggcgcgcatctccgctgacgatagctgttcacgccgggattgggttgctcgccatgaccggttacctgaccggcgtcagcaaaggcatcgaatatggcgtgccggccgggttggccgcgctcatcgccgatttgctcccgctcggcaccgcgctgctgagcatgctgttgcaacgccgcttgcccgatggccgcgtttggtccgggttagctctgggggttagcggggtaacgctggcgaccggcagcgccatctcatggggagatgccccattgtggagttacctgttgccgctggcggggatgttggcgctggcgctggcaacgctgtggcaggaacggctgccgcagacgcaagcaatgagtttgccatcctcgctggggatacaaagcgcggtttccgcgctggctttcgccgccatggccggcgcggaaggcccgctgctgccaacggtaacgacggggtttgtgatcggcgtgctttggaccgcgctactggcgacgctggccggctacggtctgtactggttttgtctaaggctcacttctgcgctgcgcgtgacgagcctgctgtttctcagccccttcgtcaccttctgctgggcagggttaatgttcaatgaacccctttcctggcccatgctgctaggcgcggcggtggcgggaagcggtttatggctgctaatccgtcccgccgggcgggatgagcccaaaacagcgcaacgcgctgagaaatgacggataaggcgaaaggcggcgccgttatgcgacgagttttccccgcaccaccaccttgcccggcttgatctcggggtcggcaatacgacggatcgccagattcaacgcttgccaggcgatctcttgcaagtcgtgtgacacgcacgggaaatgaaaaccgtagatctcggcatgtgaaacctcatcgatgctgaacagcgacacctcctgcatcaacggcagccggtgttcgatgcaggctttgataatgcccagggagatctggttattgcagccaacgaaaaagtccggggcgcggtgattggccagccaacggctcgtctcttgccaggcgacatccataaagaaatcggcatacagcacttcaaacgacgccactttcccttgcagcgccgcctgcagccctgtaaccctgtcccgtgcaacgttggagttctccggcccggacaccaccaccacccgctgcgctttctgttccagcagccagcgccccgcctgaaggccgcagtccaagttatcgatatacaccccgctgcagtggcgattgtccagctcacggtcgatcaataccaccgggatattcaatgtttccaaccgctttagataggaaggctggtacagatgatcgttggaaatgaccgagagaatgatcgcatcgacgttgtagccaatcagtttgtcgatgattctgtcttcgctttcctgagactcataggaatcgaacaccagggtgtcatatcccattttttgcgcttcaagcgtcatcaaccgcgtcaggccgccaaagaacgggttggccatatcagggttgacgatgccgatggttctgctgcttttcgcccgcaggttgcgcgccgcagcattgactacataaccgagttcggcagcggtctcccgaatgcggcgcagcgtttccggatgaaccttgtccggctgtgaaaatgcccgcgacgcggtgattttactgacgtttgcctgtgcggccacgctagccagcgtcgctttccgtcctcgccccaccgccaaatgcagctccttagcttaaagttatcattttgtaccattaacaacatcatgacagaactttcatcgtggcgctaatggtttacgcctgccagccggttaatccggggatcggtaaagatatccagctcgtcacggctctcggaagagaactcggacaccaccgccccccgctttccagcctgaaaccagtgccgggtattgggcgcgatggtgtattgttcgccaggccgcaagaggatatagcgattgcaggtataccactgctccgcgccttccggcacccggcataccagttcaccgccggcgtcattaagcgtcaggttttcatcgtcgacaaacagaaacacctcaccccaacggcagcgaaacgtctcttgcttgccgggcgtgccggcaaaaggaggatgcaaatgctctgggcaagtctgctcaggaaacagcaccaactctttcgcacaataccgaggtgagttgacataggtcagcagctgcagccctgagacaggatagtcggccaagccaaacgtcgcaatttcaatacgttgctgttcttcttcggtcagaacgatgtccgcctcgcgcaaatattccagcgtagcggctatggcacgttgttgtttgttcatcatttcccctgcaaagtaacggtatcgatatcagaatactgatattaaaaccgtcattacatcgccgattttgtgatcttcatccccatattgaataacaacccaccagcaaaattaactcccatcgagtaattccaacatcgatcacagtttaaccacccgctttagcccactatcgccgcattgaaatgatatcgttaccataaaaatgattcaccaggaggcaatatgaaagcattagtgttggccaaagcgggggaaatcgctattgaggacgtccagcttgccgaaacgctggggcccgatgatgtgcagataaaaattcattccgtgggcatctgcggcagtgatgtgcactattaccaacatggccgcattggcccgttcgtggttaacgccccgatggtgctcggccatgaagcttctggcgtggtgctcgcgacaggtaaaaacgtcactcacctcagcgtcggcgatcgcgtttgcatggaacccggcattccggatctcaactcgacgcagacgcgcgccggcatttacaaccttgacccggccgtgcgcttctgggcgacgccgccggtgcacggctgcctgcgcgaaaccgtcatccaccccgccgccttcacgttcaaattgccggacaacgtcagtttcgccgaaggcgccatggtggaacccttagccatcggcatgcaagcagccaccaaagccgggatcaaacccggcgatatcgcgctggtgatcggcgccgggccgatcggcgtggtcaccgctctcgcggcgctggcgggcggctgctcggacgtcattatttgcgacctgtttgacgaaaaactcgccgttgcggccagttatgaggggctgcacgccgtcaatatcaaaaccggcgacctggcggggaaagtggccgcgctcaccagcggcaatggcgccgatgtcgtgtttgaatgcagcggcgcaaaaccggccatcgctacgctggccgaacatgcggcgccaggagcgaccgccgtgctggtcggcatgccgatcgatgccgcgccgatggatatcgtcgccgcgcaggccaaggaaatcaccttcaagaccattttccgctacgccaacatgtacccgcgcacgctgcggctgttgagcagcggcaaattgcgcgtccagccgttgataagccaaacctacaagttctccgacagcgtggccgccttcgagcgcgcggcggcgggacatgcctcggacatcaaaatcatgctggaaatggagtgatcctatggcgctctatgctggcatagactgcggtacgcaaggcacgaaagtcgtgattgtcgacagcacacagggcgtgatcctcggtgagggcaacgcccctcaccgtctcatcagccaagccaatggccggcgcgaacaggaggccgactggtggattgaggcgctggtcatcgcttttcgccaagccgtgactaacgccggcgttgatgcacgggagattcatgctctgggggtctcgggccaacaacatgggtttgtacctctggacgcagacggcaacgtgctgcacagcgtcaagctgtggtgcgataccgaaaccgcagaggaaaacgaacggctcctgcagcagctcggcggtgccaacggctcgctggaaacactcggcctgcggatcgccaccggttataccgcgtcaaaaatcctttggttcaagacacaccatccggcgttgtgggcaaaactgcacaccgtattgttgcctcatgattatttgaacttctggctgaccggagagcgcgtagcggaatacggtgacgcttccggcaccgggttgttcgatgtgcgcacccgtagctggagcaaagccgccgtcgatctcatcgacgacagcggccgtctgtggcaagccctgccgccgctcaaaaacgcggagtgctgcatcggcacggtgcgccccgccgccgcggaaaaacttggcctcggcccaacggtgcgggtatcgaccggcggcggcgacaacatgatggcggccatcggttccggcaacatcgaggccggcaccctcaccctgagcctgggcacctccggcacgctgttcgcctggtctgccgcccccgtcgcggcggaatcagacatgattgccggcttctgctccagcaccaacgggtggctgccattgatttgcaccatgaatgtcacctcggccaccaccgcggtacaaacgctgctggacgaagaccttgccggctttaacggtttattggcgcaggcctcacccggcgcaggcggtgtcgagatgctgccgttcttcaatggcgaacgcgttccgccgctgcctcacgcgcgcgccagtctgcataacctcgatagcgacaattttacccgcgccaatctctgcctggcggtggtcgaaagcgccacctatggcctgcgctatggcatcgagctgtttcgccgtcagggcattgaagcgcgcgagatccgcctcaccggcggcggcgctcgcagcgccgcctggcgacaaatcgtcgcggacgtgatggggtgcccggtggtctgtctgaaagccaaagagaccgctgcgctgggcggtgccattcaggcgatgtgggcgacgacgttggccgacgatccgctgcggaatgccggcgcgttgctgtccgaactgtgccaacgtttcgttgcgctggatgaggccacacgcgcacggccacatgccggcagacgggcgcaatacgagacgctttatcaacggtacctgcaacgcttgcagcagacctacccggaggtgcaactgtgacgcgagatccccatacgcaagcgcccgcctacctgctggaggtcagcggcgtcagaaaagcctttggcccggtcgtggcgctcaagaatgcggagttttgcctgcggcgtggttccatccatgccctgtgcggcggcaacggcgcgggtaaatccacctttctcagcattctgatgggctttattcaacccgatggcggcgacatttttatcaatggccaacgctgtgaatttcatcatccccgggaagccctcaacgccggcatcgccatcgtgcagcaggaactgagcgcgatcccggatctgacggtggccgaaaacatttggctgggccgtgagccgagacgcctggggttcgtcgatttcgccacgctcaatcaacgcaccaccagcctgctcaaggaactcgatttcaagatcgacgcccgagagaaaatgcgcaacctgagcgtcgccgagcagcagctggtcgagatcgccaaagcgctgtcgcatgccaatgccgacatcatcatcatggatgaacccacctcggcgattggcgaggaggatgcgcaaaaaatctttcagacgcttcagcaattggcggcgaaaggtaaaggcattatttacgtctctcaccgtttgtcagagatatttcaaattgcggacagctacaccattttccgcgacggcgcctatatccatgaaggctatatcgccgacattacccgtgagcagttgatcgaacacattatcggcggcgagtacgacagcgagttcgccaaattcaatcagcccggcgaagaggtcttgctggaggtcaacggcctgtgttggcgcagcaagataaaggatatcagcctgcagcttaagcacggtgaaatcctgggcatctacgggctggtgggatcgggccgcagcgaatttctcgatcttatcttcggcattcagcatgccgacagcggcacgatccgtttgggcgacaagacgctgaaccgccattccccgcgagaggccatcgacagcggcattgcctacgtgacggaagatcgcaaggaaaccggcctggtgctgtgccgttccgtcagtgaaaacatcaatatcgcctcttttgccggcatcagccgaatggggttcgtcagcgagaaacgggagcaggcgcgaacccgcgacatgatccagcgcttcaacgttaaaacccacgatggcgaacagcccgtgggcaacctgagcggcggcaaccagcaaaaagtggtgctgggccgctgggcgctgctggatccggaggtgttgttgctcgacgagccgacgcgcggcatcgacgtcggcgccaagaaagagatctatcgatttatgtcggagttcgccttgcaaaacaaggggatcatcatggtttcctccgagctttcggaaattatcggcatgagcgatcgcatattggtgtttcgtgacgggcagttggccggtgagctttcggcagccgatgcgacccaggcagcactgatgaaacttgcggtttaacagagagagaaaaaaaatgagcagcgcccactccttatcaccaggaatttcatttttcacccgcaataagcgccgtatgcacaaatacggcattatcatcgccttcttcgcgctgtgcctgatcgtggcgctgattggcgaatatcaggtcgcccagggggcctggagcagcaattattttctcagcaatgaaaacaccctgatcgtcctgcgccaggtctcgatcaacggcattctggcgatcggcatgaccttcgtcatcattacggccggcgtcgatctctccgtgggctcggtgctggcgctaagcgggatcgtcgccgcccgcttcgccaccaacaacagcggattggctatcggcgacaccgcgaccgccgtcatggcgccgctgatcgtggcgctgggcatcgggatcgtctgcggcctggtgaacggcaccgtgttggctcgctaccggctgcaaccctttatcgtcaccatgggcatgctctctgcggcgcgcggtttaaccatgttgaccaccaacggcaatccggtttcgcaattgaacagcgatttccgctggttgggcaatggttatgtcggcggcgttccggtgccggtcattatcttcatcgtgctgttcgccctcgcctggctggtgctgaataaaaccctcttcgggcgctacatctacgccgtcggcggcaacccgaaaagcgcgcgcacctcggggattaacgtcacgcgcatcaaaatactggtgtatacgctgtgcggcgcgctggccggcatcgccggcctgatcctcaccgcacgcaccggttcggcgcagaccaacgccggcgcagggtatgagctggacgccatcgcagcggtggtgatcggtggcaccagcatggccggcggcgtcggtacgctggtcggcaccttcttcggcgtgctgattatcggggtgatgaataacggcctcgatctgctcggcgtgcaatcgtattaccaacaaattatcaaaggcgcattgatcgttcttgccgtcttgctcgacccatcgcgtaagcaacagcgcgattaataacatcagacccaactctaccaggagaaaaccatgaataagaccaagatagcgttgtttgcctctgccatgatgctcggtagcctgtcggcagctcaggccgccccggtaaaaatcgcggtattgatgtacggcaacaaagccgagttcgtgcaattgatggaaaggttcggcaaggagcacccggcggtgaaaagcggcgaagccgtgctgaccttctacgatgggcgttatgatgcctcggtgcaaaacgatcaggccgccaccgctatccagacgcgcgccgatgccattatcgtcaacccgatggattttgaggccaatatcgatatcgtcactaatgccaacgaagccaaaattccggtggtggtcaccaacgcgcgcctgaacacggacgcgatgacgtctgaagtagtgtctaatgacgagttggggggatacctggaagccaaagccgtcctggacaaactcgactgcaagaaccgaaaggtgaacgtggtgattatcgaaggcccgaaaggcggcagcggcgagatccagcgcggcaagggcaatgataaagcgattgccgagtgcggcgtcggccaggtcacggtacttgaacgtaaaacggccaactggtcacgcgcggaagcgcagccgctgatggaaaactggctgcagaaacaccggggcaaaatcaacggcgtgatcggccaaaacgacgagatggcgctgggcgctatcgaggcgatcaaaggcgccggcctgaatgtgaaggacttcgcgattgccggcgttgacggcgtttccgacgcgattcatgcggtgcaggccggtgaaatggtctctattctgcaagatgccaaaggccagatgcagggttccatcgacgtcgcgctgcgcgccgtgaaaggggaaagctatcaaccgcagtcggagatctggaagcaatatgccaaggatctgaaatgggagggcggcacgcaaaagcattactacatcccgtggaccgtcgttaccgcagagaacgcccagtcgctgttggacgcccgtaaataatttcccccgccccctgccttcagggggccccgctggggcgcttgcctgcaaacaaaaaaaagccagcacggagtggctggctaaaaagttcttcgagggaatatcttgtgcgataaacatacgcctttcactgcgggctttactagctatcagtgcgataggcaccctcagttaaaatcaacgcctgcatatcggtgaacatcgcttcccattccgcctgatcgatatccatcaaaccaaagtaacgcagcataaaggcgccttcggtggcgagaaacgccaggcgcgcgcgcttgccttcttccgtcgtcaaatccaaaccggcgatgcggctgcgataccattcgcgcgtgctcgccagatgctccggcgtttgaatcagcgtcgccatcagcccggcggccttggcgctggcggtctgatccgagctttgcgtcgccagcatatgcgcccgcacgccggtctgcggtgaaggatcgtcaccggcgatagcggcgaacagcgtctcgtaggcactgccccagcgatcgaacatggcgtcaatcagggcgtctttgctgccgaaacagtactgcaccccgcccttggagatccccatcgctttggcgacggcgtcgatggtcaaaccggcggccccctgagtggcgacgatctcttcggcggcgtccaaaaccttgtcgcgatcgatgctgcgttgacgtcccattaagaaacccttcttttcaatacgaacgtatggatatatattatcaccagtatatcatccggcatcgccggatgggttacccgaatggcggcgccttcgcgccgcctactttaactggattatgacttatgtacgccaagaaccgctggttgatcctgacgatggtcgccagcgccctgttcctgatcgtcatcgatatgacggtgctctataccgctctgccgcgtttaacccaggcgctggacgccagcgcctcgcaaaaactctggatcgtcaacgcctacccgttggtggtggccggtctgttgcctggcgccggcatgctgagcgatcgcatcggccataaacggctgtttctcgccgggctgccggtgtttgccgtcgcgtcgctgtgcgccgctttctcgcctaccgccgagtggctgatcgccgcgcgggtattcctcgccgttggcgcggcaatgatgatgcccgccacgctgtccatcgtacgccacgtctttaccgacgaacgcgaacgcgcgctggcgatcggcatctgggcgtcggtggcctccggcggcgcggccatcggcccggtggtcggcggcctgctgttggaatatttctggtggggctcggtgttcctgatcaatgtgccggtggtgttgctggtctggccgttggcatggaaactgatcccgcgctgcggcggcgataacccgcgccccgccgacatcgtcggctcgatacagatcatgataggcctggtcggcgctatctatgcgctgaaagaattgagcaagccggcgcctgacgtcagcgccttgctcgcggcggccctgatcggcatcctgttcctggcgctgttcgtgcgtcgtcagcagcgcagcgcccacccgatgatcgatttctctctgttccgcaaccggctgttcgctggcggcatcggcgtggcattgctgtcgatggtggcgctgatcggcgtcgagctggtgctcagccaacgcttgcaactggtgctcggcctcagtccgctgcaggcggcgctgttcatcttgccgatcccgctggcctcggcgttggcggggccgatggccggtttgctgctgccgcgctacggcgaacgcagcattatcctcggcggtttcgccctgaccgccttcggcattgccgccctcgccctgttgtctcagagcggcatagcgccgcagctggtgagcctggcgctggtgggcttcggcctcggcggcgtgatcaccgccgcttccaccgccatcatgctgaacgcgccggaggagaaatccggcatggcggcgtccatcgaagacgtctcctacgagctgggcggcgtgctgggcgtgacgctgctcggcgggctgatgacggcggtttacagccacagcctggcgctgccggcggagctgccggtcagcgatttagcctacgacagcatcgacgaagcgttgcgcctggcggccggaatggcggccgatcgcgcgcagcagttgacgcaactggcgcgtctggcctttgatcgcgcctttatttcggtactgatcgccgccgcgctgttaatggcgctgggcgcaggtgtggtaaaactggcgctgcgcaagtaaccgagaaaagcggcttttttcgcctgcggaacctgcgtaaactgattcggcaatttgctcggcggatttatcgtcatcggtttgagcgatggcaataatgcctgttatcgtatttaaccctgcgataaatccggttactgtaacagctatggaaattgattctgtctactatcggaacaaataatcaggagaagattattatggcaacggcaaagaaagcagcgaaaacccatatcggccttgacagtaaacaatcggcaaaactcgccgaagcgctcaatgcgctgttggcaaactatcaggtgctgtatatgaacgtgcgcggctatcattggaacattaccggcccgcagttctttgaactgcacgcgaaattcgaagagacatataacgatctgctgaccaaggtagatgagctggcggaacgtattctgacgttgggctcgcagccgcgtcacgctttcagcgattatctgaaaaccgccgacatcaaggaacacaccaacgtgaccgatgataagggcacgctgcgcggcctgttggaagggtattcaatcttgctgcaacagcagcgtgagctgctgacggtggcggcagacgccggcgacgaaggcaccgcgtcgctgatgagcgattacatcaaagagcaggaaaaacaggtctggatgctcaacgcctatttgggcaaataactcagatgccataacaaaacagtcccttacgggactgttttcgtttttaccactcgcaggataccgcaaacagcagcgcgcgccgatgctgatcgtccaggcggcgccgcacccggataatatggcgattgctgcacgactggcgttccagccagcgatgccgccgacgttggctctgccgcaacatgcgccagcggcccacttcatttctactgcgtctcataattccgtcactcgttcgtctaatgccaaccgcgggcattatagccctttccgcccgcgatccaagccgccgttatcggcggcacagcggacgccacgcgggcaaaagccgccctttcaatttcggcaagtgccttaacttcatcatatttatgcaacataagcgccgataaaaggtttcgccttgcccgatctgtgcgtacactcatcattggtggtttgcgaacgggatttttcgcctttatgacaacattttataccgtaatcagttggctcatggtgttcggctactggctgctgatcgccggcgtgacgatgcgcattttgatgaaacgccgtgcggttccctctgccatggcctggctgctggttatctatattctgccgctgttcggcatcgtcgcctatttatcgttcggcgaactgcacctgggcaagcgccgtgccgagcgcgccaaggccatgtggccgtcgaccgcgcgctggctgaaggaattgaaagagagccgccgcatcttcgccaccgaatacagtgaagtcgccgaaccgctgttccagctgtgcaaccgccgccagggcatcgacggcgtcaagggcaaccagctgcagctgctcaccactaccgacgacacgttgaaggcgctgatccgcgacatcgagctggcgcgccacaacatcgaaatggtgttctatatctggcagcccggcggcctggtcgatcaggtggccgaatcgctgatggccgccgcgcggcgcggcgtacactgccgcctgatgctggactccgccggcagcctgccatttttccgcagcccctacccggcgatgatgcgcaacgccggcatcgaagtggtcgaagcgctgaaggtcaacctgctgcgcgtattcctgcgccgcatggatctacgccagcaccgcaaggtggtgctgatcgacaactacatcgcctataccggcagcatgaacatggtcgacccgcgctatttcaagcaggatgcgggcgtcggccaatggatcgatctgatggcgcgcatggaaggcccggtggccactacgatgggcatcgtctatgcctgcgactgggagattgaaaccggcaagcgcattctgccgccgccgccggacgtcaacatcatgccgttcgagcaggaaagcggccataccattcaggtgatcgcctccggccccggcttccccgaggagatgatccaccaggcgctgttgaccgcggtctattccgcgcgcgagcagctgatcatgaccacgccgtacttcgtgccgagcgacgatctgctgcacgccatctgcaccgccgctctgcgcggcgttgaggtcagcatcatcgtgccgcgcgacaacgattcgatgatggtgcgctgggccagccgggcgttcttctccgagctgctggaagccggcgtgaaaatctatcagttcgaaggcggcctgctgcacaccaagagcgtgctggtcgacggccagctcagcctggtcggcaccgtcaatctggatatgcgcagcctgtggctcaacttcgagatcaccctggtgatcgacgacgacggcttcggcagcgatctggcctgcgtgcaggaagattacatcgcccgctccaagctgctgaacgccaaagagtggttgaagcggccgttctggcatcgcctggtcgaacgcctgttctactttttcagcccgctgctgtaaaagccgcagcgagcgtgctttaataacgccaaatcatttgttatcaggatttttttatggatttgaataaccgccttaccgaagacgaaacgctggaacaggcctacgacatcttcctcgaattggccggcgacaatctggatccggcggatattctgctgttcaatctgcagtttgaagagcgcggcggcgcagaactgtacgacccctccgaagactggagcgagcacgtggattacgacctgaatccggacttcttcgccgaagtggtgatcggtctggcggacagcgacggcgagccgatcaacgacgtgttcgcccgcgtgctgatctgccgcgagaaagaccacaagctgtgccacattctgtggaaagagtgattcgccgctcatatttcggataaaaaaagccccgctgagtcagcggggctttttgttgccggctagcggcgcattacagcggatcgaccttcaggcatgaaaccgcatgacggaaactgccctccagcagcggacgcgtcttggcgcactccggcccggcgatcgggcagcgggtgcggaacacgcagccggacggcgggttgatcggcgaaggcagctccccttccaacagctggatctgcttttccttctccttgtccggatccgggatcggcaccgccgacatcaacgccttggtgtaagggtgctgcggattgtggtacacctcgtcataggtgcccagctccaccgcatggcccagatacatcaccagcacgcgatcggaaatgtgcttcaccaccgccaaatcgtgggcgataaagatcaatgacaggcccatctcgcgctgcagctgctgcagcaggtttaccacctgcgcctgaatcgacacgtccaacgcggaaaccggctcgtcgcagatcaccagcttcggttcgaggatcagcgcgcgcgcgatgccgatgcgctggcattggccgccggagaactcgtgcggataacggttgatcagattaggcagcaggccgaccttcagcatcatcgccttgaccttgtccttcacttcctgacgcggcattttcgggtagtaggtgcgcagcggctcggcgatgatttcgccgatggtcatgcgcgggttgagcgaagccagcggatcctggaagatcatctggatatcgctgcgggttttgcgccagtcggcgtcgttcatgcccagcagatctttacccagccaggcgacgcgcccgctggtggccttcaccaggccgatgatggcgcgcgcgaaggtggatttgccgcagccggattcgccgaccacgcccagggtttccccctcgaacaaccgcagcgtaacgccatcgaccgccttcagggttttcggcggctgccagaaccactgcttgtcgtcatgaatgtcgaagtgcactttcagatcggccacttcgagcagtactttcttgtcggttaccgctgtcataccaacgcctccaccggtttaaagcaggcgcgcaggcgcccttccccaaattgctccaatggcggagcgctcgcgcactgttccatggcgtacgggcagcgcggctggaacgggcaacctttcggcagccgcagcaggttcggcgggttgccgggaatggtcagcaacgcttcgccttcggcgtcgaggcgcggcaccgcgttcaacaacccgatggagtacgggtggctcggctggtagaacacctcgcgcgcgctgccgtattccatggtacggccggcgtacatcaccagcaccttgttgcagatgccggccaccacgcccagatcgtgggtgatcatgatgatggcggtgttgaactcgcgcttgagctcgttgagcagcgtcatgatctgcgcctgaacggtcacgtccagcgcggtagtcggctcgtcggcgatcagcagcttcggccggcacagcagcgccatggcgatcatcacgcgctggcgcatgccgccggaaaactcatgcggatacatgcgcatgcgcttgcgcgcttccggcattttcaccgcgtcgagcatgcgcaccgactcttcgaaggcttcgcttttgctcattttcttatgcagcatcagcacttccatcagctgttcgccaacgcgcatatacgggttgagcgaggtcatcgggtcctggaagatcatcgagatctcttcggcccgcagcttgttgagctggttttccggcaggttgaggatttcgcggccgttgaatttggccgagccgccgatgcggccattactggccagcaaccccatcagggcgaacgcggtctgcgatttgccggagccggattcgccgacgatgcccagcgtttcaccggcgcgcagatcgaagttcagatcgttcaccgccgtcacgtcgccgtccggggtggaaaacgtgacgcgcaggtctttcacgtccagcagcggcgacgctttaacgccgacggcggtttgcatctcaggatgttcaatggtgctcatggtggcactccttaacgatctttcgggtcgagggcgtcacgcaggccatcgccgatgaagttgaaacagaacagagtgacaaccaggaaacccgccgggaacagcagcaaccacggtgaaacttccattgagttggcgccgtcgctgagcaatgcgccccagctgctcagcggctcctgcgtacccagccccaggaagctgaggaaggattcgaacaggatcatgctcggcaccagcaacgaggcatacaccaccaccacgccgagcacgttaggcacgatatgccgcagcacgatgttgcgcgtggaaacgccgcacaccagcgccgcttcgatgaactccttgcgcttcagaccgagggtttggccgcgcacgatacgcgccatgtccaaccacgataccatgccgatcgccacgaagatcagcaggatattctggccgaagaaggtcaccagcaggatcacgaagaacatgaacgggaaggagttgaggatctccagcaggcgcatcatcaccgagtcgatcttgccgcccagatagccggacatcgcgccgtacagggtgccgacgatcaccgccactagggccgccgccacgccgaccatcagcgagatgcgcccgccgatcgccacgcgcaccagcagatcgcgcccggaggagtcggtgccgaaatagtgccccgattcaacgctgggtgcggcggacatcatcgcccaatcggtatcgtcgtaggcgaattgcgacagcatcggcgccagcaccacaaacagagtgatcagcgccagtatgaacaggctgctgaccgccgcgcggttgtgcataaaacgccgacgcgcgtcttgccacaggctgcgcccttccacttccagcttctcgctgaagtgttccagagcttcgctgttctttttagtcaacatcattcgcgtgctccagattaataacggattttcggatcgatgaccgcatacagcacatcgacgatcgcgttgaacagaatggtcagagcgcccaccagaatggtcaggctcaacaccagggagtagtcgcggttcagcgcgccgttaacgaacagctggccgatccccggcagaccgtagatggtttcgatcaccattgaaccggtgatgatcccgacgaacgccgggcccatgtaggacagcaccggcaacagcgccggcttcagcgcgtggcggaaaatgatgcgacgcatcggcaagcctttggcgcgcgcggtgcggatgaagttggagtgcaacacttcaatcatcgagccgcgcgtgatacgggcgatgctggcgatataggccagcgacaacgccaccatcggcaagatgatgaacttaggcgcaccgccgttccagccgccgcccggcagccatttcaacgtgatggcgaagatcagcaccaacagcggcgccaccacgaaactgggtatcaccaccccggtcatggcgaaccccatcaccgtatagtcccatttggtgttctggttcagcgcggcgatcacaccggcgctcacgcccagcaccaccgccagcagaaacgcggccagaccgagtttggcggagaccgggaaagagctggccaccaaatcgttgaccgaataatccttgtatttaaaggacgggccgaagtctccctgcgcaagctgcgccagataatgaccgtactgtttccagatcgggtcgttcaaatgatatttggcttcgatattcgccatgacttccggcggcaatgcgcgttccccggtaaatggactgccgggcgccaggcgcatcatgaagaatgagatggtgataaggataaatagtgtcgggatcgcttccaacaagcgacgaagtataaatttaagcattgccctaaccctgtgcgacagcctgataacggcttattattctcaacatgggccggcggccaagccgccggctcttaccgtatcaatgcttgatgatgtacaggtttttgtcgtacacgttatcaagcgggtctttgccggtgtagccaccgacgtaaggtttcaccaaacgggcgttcacatagtaatacagcggaacgatggcggaatctttatccagctgaacttccgctttctgatacagatcggcgcgctcgtctttggtcttcgcggtcaacacgttggccatcagcttgtcgaactcggcgctcttgtagtgcggggtgttactgctgctgtcggacagcatcatgttcaggaacgagctcggctcgttgtaatcggcgcaccagccggcgcgcgccacgtcataggtgccctgatgacgggtatccaggaaggttttccactcctggttcaccagcttcacgtccacgcccaggtttttcttccagatggaggcggcggcgatcgccagcttcttgtgcaggtctgacgtgttgtacagcagggagaaggtcagcggtttacccgggccgtagccggcgtccgccagcagtttcttcgccacttcgttgcgtttttcctgcgtccagccgaaccactccggcggggtcagcttggcaccgtcggtgtatggcggcgtaaagctgtaggccggcagatcgccctggtttttcaccttgttgacgataatgtcgcggtccatgcccagcttcagcgcttcacgcacgcgcgcatcggtgaacggcgccttctggttgttgatttcgtagtagtaggtgcacagataaggatcgacgtgcacctctttcgggatctctttcttcaacttctggaacagttcgatcggcatgttgttgtaggtcatgtcgatttcaccggtgcggtagcggttaacgtcggtcacttccgacgaaataggcaggaacgtcactttattgatgatggttttggcgttatcccaatattccgggttgcgttccagtacgatgcgttcgttgacaatccagtctttcagtttgtaggcgccgttgctgacgtagttggccggcagcgtccacttctcgccgaatttctccaccgcctctttataaaccggcttcatggcgtagtgcggggtcatttcaaccagataaggcaccggctcgctcagggtcacctggaaagtatggtcgtcgatggccttcacgcccagcgtcgacttgtcttttttaccggcgatgatgtcatcgacgttttccacatgggcgtactgcaggtagctggcgtaaggcgacgcggttttcggatccactacgcgctgccagctgtagacgaaatcttgcgccgtcaccggcttgccgttggaccatttggcgtctttgcgcaggtggaaggtccagactttgaaatccttgttatcccagctttccgcgacgcccggcacgatggaaccgtccgggctgttgttcgccaggccttccatcagatcgcgggtcacgttgttttccggcacgccctcgattttatgcggatccagcgactgcacttcggaaccgttgtttttgacgatttcttgcttatccgccagctgcacccccgcaggaacgtcggcggcgaaagcgccggtggttgctgtgatgccgagcgcggcgatgacgccggcggcaatgagggttttcttcgtgatgttggtcatacttatcgactccagtttttattatcacaggctcttcgtggaacctgcgttgcccgtaagcggactctgttttcccgccgccgcggaacgaatgcggcggccggccttccctatatcccccagcgcctcggcgtgaggaatacccctttactgcttgataatgtaaagatttttaacgtcggtatagtccagcggatctttgccggtgaacccgcctaccgtcggcttaatcaaccgcgcgctgacgcggtaatacaccgggatcaacgcggagtctttgtccagctgcgcttctgcctgctgatagagcgcggcgcgcgcggcctcatccggcgccttcagggtggcggccatgatggcgtcgaacgccgggctcttataaaacacggtattgatgctgctgttggacagcaccaggttcaggaaggcgctgggttcgttgtaatccccgcaccaggtggcgcgcgccacgtcgtattgcccctgatggcggctttccagcgaggtcttccactcctgattgcgcagcgtgacgtcggcgccgaggttcttcttccacatcgacgcggcggcgatcgcctgctgtttgttttgatcggaggtgttgtacagcagcgagaacttcagcggtttggcgtcgctgtaacccgcttccgccagcagtttcttggcttcggcgttgcgttgttcctggctccagccggcccaggcgggctgcgtgaagttggcgccttcggtgaaggttggcgtgaaactgtaggccgggatctgcccctggcccatgatcttgttggcgatgatgtcgcgatccagcgtcatcttcaccgccgtacgcacccgcggatcggtgaacggcgcccgctggttattgagttcgtaatagaaagtgcacagataagggttaacgtgcagttgctcgggcacttcgcgcttcattttgacatacaggtacggcggaatggcgctgttggtgatgtcgatctcgccgctgcggaagcggttgacgtcgctgacttcggaagcgatcggcaggaaggtcgcctgattgatcaccgtctgcttgttgttccagtagctcgggctgcgctccagcacaatgcgctcgttcaccacccactctttcagacggtaagcgccgttgccgacatagttggcgggcaacgtccatttgtcgccgaatttctccactaccgcgcgtttcaccggtttgagcgacgtgtggctcagcatgctgatgaaatacggcaccggttcgctcagcgtcacctgcagcgtctggtcgtccagcgccttgacgccgagggcctgtggaggcttcttaccggtcaggatatcgtcgatattgtcgactttggtgtactgcaggtagctggcatagggcgaggcgattttcggatcggccaggcgctgccagctgtagacgaagtcttgcgcggtcaccgggctgccgtcgctccacaccgcgccggggcgcaggtggaaggtccattgctgataattctggttttcccagctcgccgccgccgccggcaccacatgcccgttggcgtcggtgctcaccagcccttccagcaggttaagaatgatattgctttccggtacgccctcgaccttatgcggatccaatgaagccacttcgctgccgttgttgatcacaatattctgctgctgcgccaactgaacgccggccggcacttccgccgccaaactgctatttatggcgccgacgctcagcgcgccgctaatcaacaaggtcaaagaagtgcgcttcagggtttgctgcataatcgaggctccttttcaccgacaagcatcgcttatcgaagtttgtgaagtgtttataagaattctaaataaacggataccagcaaaaatcattcccgtttttatggcgcatttcagttaattgaccacgggaaagttgctcggaaattagcagaagccaaattccatagccaataaattttacgaaaatgttaagcaattctcttttatcgcacgaagcccgatccggcccccaagatcgaggacgcggagaaacaaaatcatcgctatgattttaaagaaaaaaaagacgaaatcatttcatttgaaaccatcaacgcaatctcattaccgcacaaagaaacattcagttaacaatccggacattcaaagaacaaacacctgcctatggtcggttaatcactaataacacctggatgaaagtgagacaagccccacagaatgatgtgattaatttaacaacagctttaccgttgagcgggggaaaaacgcgcggaaatgggggaagaaaagtgtctgaaataacgcttagcgttttttttgcacagcaacatgagatttatgcaacataagagtgcaaccgcataaattttattcatcctgtgcactataataatgcgaaccaataaataatttaaactttaaaattaattttagccgcgccaaggcgaaaggtgcgcggctaaaccaagggtattacaacaggccggggaatatcgccttaatgccggtaacgataaactcgatcccgagcgccatcagcaacagacccattatacgggtgatcacgttgatgccggtctgcccaagcaaacgcaccaacagcggcgcggcgcggaacaacaaccaacagcaaaaggcgaacaaggcgattgcgaccgtaaagccgagcaggctttgccagttgtgataacgggaactccacacgatggtggaactgatcgcccccggccccgccatcagcggcagcgctaacggcaccacgccgatgctctcgcggatcgcgctctccgatttttcctgtttgttctgtttgtcttctcccagcttgccgctgatcatcgacatggcgatggtcaccaccagaataccgccggcgatgcggaacgaatcgatggagatgccgaacatccgcaagatcccttcgcccaggaacagcgatgtccacagaataatggcgaccgacaggttggcggtcaggttggttttattgcgccctgcttccgcctggtagctggtcatgctgataaacaccggcaagatacccaccgggttgaccagcgcaaacagaccgacaaagaacttgataaagccggaaagatccaacagagattggcccacagatggctccgcgttaagtgctataaaaaggtgtgctgcctatgcgcgctaatgtaatggaattgccgcgggtaatccatccggccagagcagcatttttgactaccagcaagttaggcaacaaaacaaatgccctttgttaaagtgatgtatggccttttgattttttatgttgaaaaaagagtcatcgatcacagttattgataaccactctcaacaccgtcaagctgaaaggtgtcagcttgcacttttcatgatttagatcacaaatcaactacccaacagtgggtaagctcttagtcgtagtcagggagtagaacaaagtcggtggcaatccagccggttccgttctcttcactgcctgcccctccggttggcgcagggtaaagctctttaagcaaatcagcagcatgcgaagaaataacgcgggaaacccccggtattcgaatcaccgtttattcccgttatgactatactagtggctcgcacggcttatttactgaaagagtttaacattatcaggagagcattatggctgtaacgaatgtcgctgaactaaacgagcttgtcgcacgtgtcaaaaaagcccagcgcgaatatgccaacttcactcaagagcaagtggataaaatcttccgcgctgccgccctcgccgctgctgatgcccgtatcccgttggccaaaatggccgtggaagaatccggaatgggtatcgtcgaagacaaagtgatcaaaaaccacttcgcttccgagtacatctacaacgcctataaagatgaaaaaacctgtggcatcctgtctgaagatgacactttcggtaccatcaccatcgccgaacctatcggcctgatttgcggtatcgtccctaccaccaacccaacttctaccgcgatcttcaaagcgctgatcagcctgaaaacccgtaacggcatcatcttctcgccgcacccgcgtgcgaaaaatgccaccaataaagccgccgatatcgtgctgcaagccgctatcgccgccggcgcgccaaaagacatcatcggttggatcgaccaacctaccgtcgaactgtccaaccaactgatgcaccaccctgacatcaacctgatcctggccaccggtggcccgggcatggtgaaagccgcctacagctccggcaaaccggccatcggcgtcggcgccggtaatacgccggtcgtggtagacgaaaccgcagacatcaagcgcgtggtcgcctctatcctgatgtccaaaaccttcgacagcggcgttatctgcgcttccgaacagtcggtcatcgtcgttgacgctatctatgatgcggtacgcgaacgcttcgcttcccacggcggctatctgctgcagggtaaagaactgaaagcggtgcaggacatcatcctgaaaaacggcggtctgaatgcggccatcgtcgggcaatccgcaccgaaaatcgccgaaatggcaggcatcaaagtaccggccaacaccaaagtgctgatcggtgaagtgaagctggtcgacgagtccgaacctttcgcacatgaaaaactgtcgcctaccctggcgatgtaccgtgccaaagacttcgaagacgcggtcgccaaagccgaaaaactggtcgccatgggcggtatcggccacacctcctgcctgtacaccgaccaggataaccaaacggctcgcatcgcctacttcggcgataaaatgaaaacggctcgcatcctgatcaacaccccggcttctcagggcggtatcggcgacctgtacaacttcaaactcgcgccttcgctgacgctgggttgcggttcctggggtggcaactccatctctgaaaacgtcggacctaaacacctgatcaacaagaaaactgtagcgaagcgagcagaaaacatgttgtggcacaaacttccgaaatcgatctacttccgccgtggctcgctgcctatcgcgctggaagaagtggcgaccgacggggcgaaacgcgccttcatcgtgaccgaccgtttcctgttcaacaacggctatgctgaccagatcaccaaggttctgaagtctcacggcatcgaaaccgaagtgttcttcgaagtggaagccgatccgacgctgagcatcgtgcgtaaaggcgccgagcagatgaactccttcaaaccggacgtcatcatcgcgctgggcggcggttcgccgatggacgccgcgaaaatcatgtgggtgctgtacgaacatcctgaaacccacttcgaggatctggcgctgcgcttcatggacatccgcaagcgtatctacaaattcccgaaaatgggcgtgaaagcgaaaatgatcgccatcaccacaacctcaggtaccggttcagaagtcacgccgttcgcggtcgtgaccgacgacgccaccgggcagaaatacccgctggccgactatgcgctgaccccggacatggcgattgtcgacgccaacctggtgatgaacatgccgaaatccctgtgcgccttcggtggcctggatgcggtgacccacgcgctggaagcctacgtctcggtgctggcgaacgaatactccgacggccaggcgctgcaggcgctgaaactgttgaaagagtatctgccggccagctacaaagaaggcgcgaaaaacccggttgcccgtgaacgcgtgcacaacgccgccaccatcgccggtatcgctttcgccaacgccttcctcggggtttgtcactccatggcacacaaactgggttcggagttccacattccgcacggcctggccaacgcgatgctgatttccaacgtcattcgctacaacgcgaacgacaacccgaccaagcagacggccttcagccagtacgaccgccctcaggcgcgccgccgctacgctgaaatcgccgaccacctcggcctgagcgcaccgggcgaccgcaccgcgcagaagattgagaaactgctggcctggctggacgagctgaaaaccgagctgggcatcccaacctccatccgtgaggcgggtgtgcaggaggcggacttcctggcgaaagtcgacaagctgtcggaagacgcgttcgacgaccaatgcaccggcgccaacccacgctatccgctgattgccgaactgaagcaaatcatgctggataccttctacggccgcgaattcagcgaaacagtcgaagaggaagcgacagctccggctgtagccaaagccgcggtaaagaagtccaagaaataacggtttcgtgaaccgataaaaaaacccgccaaacggcgggttttttattgcgccggaggcgctgcatttcgactcacgccgccaaaacgcctcagcgggctttggcggcgttttctccccctactccagggagtgaatcgcctctttataatgcttgcggcagacggagacatagctctcgttaccgccaatcaccacctgctcaccggcgtgcatcgcctggccgttttcatccaaccgcaacaccatattggctttgcgcccacagtgacagatggttttcaattccaccagcttatcagcccaggccagcaaatattggctgccggtaaacagctcaccgagaaaatcggtacgcaggccgtagcacaatacgggaatgtccagttggtccaccacatcacacaattgctcaacctgcgccttggtcaggaactggctttcatccagcagtacacaatgcaccggctgctgttgatgctcttgctgaatcatggcgtacagcatcgagtcgttgttatagagctgggcctgcgaggataaaccgatgcgcgagctgaccttacctacgccaaagcggtgatcgatctccgcagtgaacaccagcgtgcgcataccacgttcttgatagttatatgaagactgtagcagcgcggtggacttgccggcattcatcgcagagtaataaaaataaagttgagccatggccccgcaactccgatggtataagaaatattcaaatgtcgattaggacggtaagtgtaccataagccgcccctaggctcagcccaaagcgaacgaatattgcgttcgccgtaataatgcgctttcaagcgaaacatatcgttctgtcggcccgttctttttacagctatttacaggataatgtatgcctgtcatcactattaattcttgctaatggttaaccgcgatcatttgcccattaatgcataatcaccctttcgccgcggcgggtgccgcaaccgcaacggcgcgccagtctattatacacggggccaatacagggcatttaatcacctccgctgtccccgacgtttcctgacgcaatctttacctatatacccctattgtttacaatgtctgccttgccatgacgtgattaagcccacagaacccattgtaatattgatataaattacggcgataacttatcgatgaaagccttgcgacacgcgccttttaaagcatgcctgctgaaattttgacttaagtgcgacaagggtaatagttaacagcccttcctatattagtcggacagatccgattaacggatttttaaaaggtaaatttgagtattcaagtcaatttggctattgcagaaaagaaaatagcactctattattatcgagacgccccccaccaatataatttgagactaggacaatgagcgaagcattaaagattttgaacaacatccgcactctgcgcgcccaggcaagagaatgcacactggaaacgctggaagaaatgctcgagaaactggaagttgttgtgaacgaacgtcgcgaagaagacagccaggctcaagcagaaatcgaagaacgcacccgtaaactgcagcaataccgcgaaatgctgattgctgacggtatcgatccgaatgaactgctgcaaaccatggctgccaacaaggctgccggtaaagcaaaacgcgcagcacgtcctgctaaataccaatataaagacgaaaacggcgaattgaaaacctggaccggccaaggccgtactccagcggtgattaagaaagctatcgaagagcaaggtaaatctctggacgatttcctgctgtaatagcgattcggcccgtatctgaaaggctccctgcggggggccttttcattttaaagcttatcgccgcgatcctgcctcatccctttccttttagtaaatatcctaattcgcattttgttccttgcatgaggttccagcgataaaaaagggccctaaggcccctttgtcgcatataccctcgttcaattattgaacctggtagaatgccttataccaatcaacaaagcgcttcacaccctcttcaacgctggtttccggcttaaaaccaatgtcacgataaagctctgcggtatccgcgctggtatccatcacgtcgccaggttgcattggcaacatattcttgcgggcagttagccccaaagcctgctccaacgccgtgatatattccatcagtttaacgggggtgttattgccgatattataaacatgatacggcgcggaactggtcgccggcgatccctgttcaacggtccatgacggatctgcctgcggaataaccgcctgcagccgcacaatcgcctcggtgatatcatcaatgtaagtaaagtcacggtgcatttcaccgtggttatatacatcgatactctcccccgccaatatggccttggtaaacttgaacagcgccatatccggacgcccccagggaccatatacggtaaagaagcgtagccccgtcgtcgggagaccgtataaatgagcgtaactgtgtgacatcagctcattggcttttttggttgccgcatacagtgacacagggtggtcgaccgaatcttcggtagcaaacggcaacttgcgattgaggccataaacagaactggaggaagcgtaaagtaaatgctcgaccttattatgacggcagccttccagaacgttcaaatgaccgatcaggttagcgtccgcataagccaacgggttgaccagcgagtaacgcacgccggcttgggcacccaaatgaatgactcgttggaactgatgctcggcgaacaatgtcgccatgccttcacgatcggccaaatccaacttgatgaagcggaatcccggcttatccgccagtctgtccagacgggccattttcaggcccacgtcataatagtcattcaggttatcgatgccgacaacctgatgcccggcggtcaacaaacgctctgcaacgtgataaccaataaaccctgcggcgcctgtaaccaggaatttcatgcccactccttaaataaccggtttaatcgaggcaccgcggccaatcgcatagtaggtaaagccgcgattcgccaaacgctcaggatcgtacaggttacgtccatcgaagatcaccggctgcttcaacgcgcccttgatcacatcaaagtccggtgcgcggaaattctgccattcggtgcagatcaccagagcatcggcgccgtgcaacgcagcctctttggtacccatcagcttcaagtcgtcgcgctggccatagatgcgctgaacttcgttcatcgcttccggatcgtaggcctgaacggtggcgccggcagcccacagctgctccatcagcacacggctggacgcttcacgcatgtcatcggtattcggcttgaacgccagcccccacagtgcaaaggttttgcccttcaaatcgctgccgaaatagtctttgataaagctgttcagcttgtctttttgttggtagttgacctgctctaccgcctgcaacagcttcggttggtaaccgatctgctccgccgtgcggatcagcgcctgaacatctttcgggaagcaagaaccaccgtagccacagccaggatagatgaagtgataaccgatgcgtgaatcggaaccgatgccctgacgcactttctcgatgtccgcgcccaacatttccgccaggttggacatttcgttcataaagctgattttggtcgccagcatgcagttggcggcatatttggtcagctccgcgctgcggatatccatcatgatcatacgatcgtgattgcggttaaacggctcgtacagctcgcgaataggctcgatcacctctttattatcggtgccgatcacgatgcgctcagggcgcatgcagtcagccactgcagcgccttccttcaggaattcagggttggacaccacgtcgaacggcacgttgctgccgcgttttgccagcgtttccgtcatcacctgacgcactttgtccgccgtaccgaccggcacggtagatttgtcgatcaccactttgcgatcggtcatgtgctcggcgatggtgcgcgccaccgcggtgacatatttcagatcggcggaaccgtcttcatccggcggcgtaccaacggcgataaactggatattcccgtgcgccacgcccgctttggcatcggtggtgaaatgcaggcgcccagcctcatagttttgctgtaccagcggcgtcaggcccggttcaaaaatcgggatattcccttttttcaggttctcgacttttcgttcgtcaacatcgatgcacataacatcatggccaacttcagccagcacggcggcctgtaccagccccacataaccaataccaaaaactgttactttcatgtgaaaatcctagtttttcaaattaagacgaaagatcaaattacttcttgtcagcggcaacaacctgttgcagccactgagaaaactctttgcccaggctggcatgacgcatgccgtactccacgaaggcctgcatgtaacccagtttgttaccgcagtcatggctcacgcctttcaggtgatacgcttccaccgtttcctgctgcatcagcatttcgatgctgtcagtcagctgaatttcatcgccggcgcctggaggcgttttcgccaacagcggccaaatatcggcggacaacacataacgaccgacaatcgccaggttggaaggggctttatccggcgacggtttctcaaccacgctgaccatcggcgcgctttcgcccggttgcaaatcaacgcccttacagtcggctacgccgtagtttccgacatccttatgcggcacgggttcaaccatgatctggctgacgccggtggcttcgaagcgctgcagcatttcgtgcaggttgtcttttttcggatcggcgctgtattcgtcgaggatcacgtccggaagcaccaccgcgaccggttcatcgcccaccatcgggtaggcacacataatcgcgtgccccaggcctttggcattaccctgacgaacctgcatcacggtaacgcctttcgggcagatcgactgcacttcgtccagcaattggcgcttgacgcgtttttccagcatcgcttcgagttcgaaactggtatcaaaatggttttcgatcgagttcttggaggagtgggtgaccagcacaatctcgttaatccccgccgcaatgcactcattgacgacgtattggatcagaggtttatcaaccagcggcagcatttctttcggaatggctttggtggccggcaacatccgcgtacccaagcctgcaaccgggatcacggcttttctgactttgcgatttacagcaggcattatttcctctcttaaagctaaagcgctcattttatgagcgtgggctcgatataaaaaaaccttcggagtataccagcttatgcgcgccgagcattaaccagaacacaaatagaaaacatttaggactattacccgttcggataatccggagaataaataaacggtttaattacagataagtaaatagcttgagatcgcgccgatcgctgcctgctattcagcgctgagcatcagtcgcaatcggccaccgctgccccatacctgacattgccaggcggtacaacgctggctgatctgattcatgtaggtagcccccagcgtccccagcggcacgccgttgctcagctggatttgattgtcaccggtattgacgttggcatgcagcccggcggaaaccagaatcaggtttttattttcggcgtgataatatcccaacaacagagggaattgaccgtccaatttcccctgccgcaataattgattaacctgctttaacaatgccgacatttgcggcaaacgatgctgttgattagccagatggtcctgcagcagcccattaaataatgcgcgcaacagcagcgccgccaatacgccattatcgccggcgcgcgtgacgtccagacaatagaatgccagatccttttctgacaaggcggcgatatccagcaccaggccgggattttcgccggtggttaactgccgatagttgatccggcaatgcgcaatggtctgctgtaccggcggctgcagttgcttaagcagtttgacggcttcggaaggatttttgctcaacgcatcccaatcctgaaacagttcaacctcttcaatcgcctgggaggtgaacatattggggtataagcacgccagcaccgcttcacgcaggcgattgagatcggtcagcggcttgagcagcacatcctgcacgcccaaccgcagcaccttggcgatgtccgccatcttgtcggtggccgagatcaccagcaccgggatctgcagcccctgcaaacgcaggtgttcaacgaattcgataccgcccatttccggcatcgcgagatcgcacagaatcagatccggcttgaagtcatcgacggcactcagcgcctgtaaaccgttggtcgcctcgccggtttcagcgcccagcgaggtcagataaccgaccagcacggaacgaaaaacctgttcgtcctcaacgatcaagatgcgcttgtgagtgagtggtaatgccatcagccgagcctcgtccctttccatagtgtaatagtggctcaaaaaggtcacttatgctcgtctgaaacagaccaactgcgcattgccaaccaagaaccgagaattatctattttttatcaacggcaacaaccgatccagttgtttttcaaccgccagcaaccccgcctcgatcgcttcatcggcgcggtggaaatccagcgttgagatttgcgggcaaaaaggctggatcaagacatccggcggatcgctcgccattcggttgcgcttcaggcgattctccagcatttgaatcgatgtgctcataatctccatcgccgtcggcgccgtcgccggtttgcgcttgcgcattctgccgacgcgttcccgcagacgcccgcgccaggtagccgcaggcgcatcgtccgggctttcttcctcgatacgtatcgagaacagatcctgctgcatcaggtgcgcgtcatgctgcagatcgaccgcaatgacgatatcggcgcccatggcgcggcaaagcgacaccggcaccggattgaccaccgcgccatccaccagccaatagccgtcggcccataccggcgccaacaggccgggcatgctgcaggaggcgcgtatcgcctgatgaatatcgccttcggtcagccacagctcacgcccggtactgagattggtcgtcacggcaccgaacttcaacgcacaatcggcgatatcattgatcttcagcagctgtccgacggcgttaaacacccgctcgccccgcaacaggccgccgcgctgccaggaaaaatccatcaggcgaatcacgtcccaatagctgaacgatcgcacccactgctccatcgccggcaggcgatggctggcgaacgcggcgcccaccaacgcgccgacagagcagccggcaacgatatcgacctcaatccccagcttctttaacgcattgatcacgccgatgtgcgcccagcctttagccgagcccgctcccagcgccagtccgatcttgatttgccgcatcgcgtcatcctctcggtaaacggtgttctctgctttcagggtagattgtcactgacgaatattgttaggtaacatatgcgctaaattcattttcagcctcgttttctcaggagtcattttgcccgaatcatgcccatgcggcagcggactggcgtataacgcgtgctgcgccccttttatcagcggcagtcagccggcaccgacgcccggccaactgatgcgttcacgcttcaccgcctacgtgaatcataacgtcgactatctgatcgccacctggcaccccgactgcggcgccgaagcatggcgcaatgccatcgtcgacagttttaagaataccgagtggctgggcctgacgatcgtggaagagaaagccggtcatgagccggatgaaggcttcgtcgaattcatcgcccgtttcaccgatggcgaaagcggcgagccgcagacgatgcatgagcgctcgcgcttccttcgtcgcgatcaacgttggtattatatcgacggcaccaaaccccagcccggccgaaatgcgatgtgtccctgtggctcagggaaaaaatacaagaagtgctgcgggcgctaatcggccagcgcttcacgtttacgcctgcgcagacaggccgttcagtatcagacaggatcctcaaacccatgccacaccaaaatgtacaacggaaagtgttacgcaccatctgcccggacgccaaagggctgatcgccaagatcaccaacatctgttacaagcacgaactcaatatcgtccagaacaatgagttcgtcgatcaccgcaccgggcgtttcttcatgcgcaccgaactggaaggcattttcaacgacaacacgctgctggccgatctggacagcgccctgccggaaggttcactgcgtgaactgcacagcaccgggcgccggcgcatcgtggtgctggtcaccaaagaggcgcactgcctgggcgatctgttgatgaaaagcgcctatggcggcctcgatgttgagatcgccgccgtaatcggcaaccacgacacgctgcaaacgctggtggagcgtttcgatattcctttccatctggtgagccacgaaggcttgacgcgcgaacagcacgaccgcgaaatgacggccaagatcgatcaatatcagccggattacgtggtgctggccaaatatatgcgcgtgctgaccccggccttcgtgcaacattatccgaatcaggtaatcaacattcaccattcgttcctgccggcgtttatcggcgcacgaccttatcaccaggcctacgagcgcggggtaaaaatcatcggcgccactgcccattacgttaacgacaatctcgacgaaggcccgatcatcatgcaggacgtgatccacgtcgatcacacctattccgccgaggatatgatgcgcgccggccgcgacgtggagaaaaacgtgctcagccgggccctgtatcaggtgttggcgcagcgcgtcttcgtctacggcaatcgcaccgttattctgtaatcgttcaataaatcggtgcatttcgttcagggatgcaccgccaagaataaaaaaacggcaaacgattcattttctgcatttcaatgctttacacatccgcttcatttgatatgatgcgccccgcttaccgagacagcgctctcgcaagcaaggccagttaaatagccatgtatatggtggggttcccgagcggccaaagggagcagactgtaaatctgccgtcactgacttcgaaggttcgaatccttcccccaccaccatcttttcgttgctgatacgcattgggttaaagcgaatcagaaagggaaggataacgcgctttagcgcggcccgaagggtgaggaacgaagtgacgaataatccttcccccaccaccatcttctctctgccaggagcgaagacgcagtaaagaaaccggccaggtttcttccgggtaaaaccggaacaacaatttgtaaatccatgaataccatggtggggttcccgagcggccaaagggagcagactgtaaatctgccgtcacagacttcgaaggttcgaatccttcccccaccaccatctcttgcagaaaatcccaaaactgagttaaaagcacatcgcctccataatgctccgcacaggggaaggatgagaagtttcgacaaggttcgagtctcacgcagtgagacaacgcgcttcagcgcggcccgcagggtgagtcgcgcagcgacgaatcatccttcccccaccaccaccttttgcagaaaatccccgaacctaattaaaagcacatcacttccataatgctccgcattggggaaggatgagaagcttcgaccaaggttcgagtctcacgcagtgagacaacgcgcttcagcgcggcccgcagggtgagtcgcgcagcgacgaatcatccttcccccaccaccaccttttgcagaaaattccaaaccctacttaaaacacgttgcatccaatgttctcgtatcaataaatcaagttatctccccttatcgccgctttcaccttgatgttttatctcctctctcccagccgtaacttgaactccggccgacaattcgctataccactggcttctttagtgcagtaaggaacaggtggatgcgaaacaatatttgcgttttttgtggcgccagcgaaggcgtcaatcccgcttatgccgagcaggctcgtcaactggggcaactgctggccgcacaggggcgccgtttaatctatggcggcggcaaaaaaggattgatggggatcgtggcagacgcggtgttggccgcaggcggtgaagcggtcggcattatccccgagcgcctggttgaagcggaaacggcgcatcgcggcctgactgaattggaagtggtgccagacatgcatacgcgcaaagcccgtatggcagcgctggcggacagttttatcgccctgcccggcggcatcggcacgctggaagagctgtttgaaatctggacctgggggcaaatcggctatcacaataagccggtcggcctgctgaacgtcaacggattctaccgcccgctgagccagttcctcgagcacgtcgccgatcagggttttatgcgtcacgactatctcggcaccctgcacatcagcgaatcggcacagacgctgctgcaacagtttgacgactatcaacctaaaaattacgaccgctgggcgaaataaacccgcggcgcagtcagcggtcctgccgctgtctgcgttacatttcccgccaaactctgctactatcacagcacatttttctcgtgaaaacggcaccgctcatgaagtttgtctcttttaatatcaatggactgcgcgcgcgtccgcatcagctggcggcaattatcgaacagcaccagcccgacgtgatcggtctgcaggaaaccaaagttcacgatgacatgttcccattggaagaagtcagccagcacggctatcacgtgttctatcacgggcaaaaaggccattacggcgtggcgctgctgaccaaagcggagcccctggccgtgcgccgcggtttcccaaccgatgaagaagacgcgcagcgtcgcatcatcatggccgatctggctacgccgcagggcacgctgacggtgatcaacggctacttcccgcaaggtgaaagccgcgaccacccgatcaaattcccggctaaaacacgcttttatcaggatctgcaaaactacctggagcagcagctgtcggcagaatccccggtgctgatcatgggcgacatgaatatcagcccgagtgattatgatatcggcatcggcgaagacaaccgcaaacgctggctgcgcaccggcaagtgctccttcctgccggaagagcgcgaatggatggatcgcctgctgaactggggcctggtggatacctatcgccacgccaacccggggcgcaacgacgagttctcatggttcgactaccgctccaaagggttcgacgacaaccgcggcctgcgtatcgatctgctgttggccagcaccccgctggcttcgcgctgcatcgccaccggcattgattaccaaacccgcggcatggagaaaccttctgaccatgcgccggtctgggcggaattcacgctgtaaccccatcccccggcgctcgccggggttttattctgtgaagccgatgaaaattatcgacgtagtagccgccattctggaacaaaatgggcgtattttgctggcccagcgcggcgcaggcagcgatcaggccggcctgtgggagtttcccggcggcaaggttgaaaccggcgaaagccagccggaggcgctgacgcgcgagctggatgaagaattggggattaacgcccgtatcggcaactatgtgggcagcaatcagtggcggcaaggcgaacgcatcatccgactgcatgcctggcgagtcgcggagttctccggtgaactgcaacagcgctgccattcggcgctggtctgggtcacgccgcaacaggcgcaggaataccccctggcgcccgctgacgttccactgttggcggattatctcgccgcgcaaggcgaggcgcgctgagcgcggtgacaggttacatcgtcacttcttcaatcgtacccaaatcaaggggttggtgccgatagtattaggctcacgcacgcactgcagcacttccccttcgactttgagcaccgccccctcggaatagttctgattctggtagacgcaacaacggctgcagggctgcgccgacggcggattgtcgccgcttttggccgcgccccagatctccggcgaaaccggtagcaccacgtccacatcgccgcgattggcggcggccaggccggaaaacatcagggccgcggcagccaatacaccagtgagtccacgcttcattcactcttctcctgcgccttgccggcgcttttcctgcgttttttgcctccgctggagggcggcggcggcaatccacgaaacgccatgctcgcccggctctgcttggcctgataaatcagctcttgcagcgtgccgaccaacggctgcataaagtcctgatagcggcaggatttctcgctgatttgcgtcagcgtggcttcccagttggccgtcatatcagggcgcgcagcaagatccggcagcgagtgaatcaatgtgcgcccggtttcgctggagtgaatatagcgtcccttcttgtacagaaacgcccgcttgaacagcaattcgatgatccccgctcgcgtcgcttccgtacctaaaccatcggtcgcccgcaggattttctttagcgctttatcttgtacgaaccgcgcgatgccggtcatggccgacaacaggctggcgtcagtaaacggccgcggcggctgcgtctggcgctccaccacttcaccgcactcgcacaacagctcatcatctttagccaccaccggcagcggcgcaccttcgttctcctcgtcgcgctccttgctgcccagcagcgtacgccagccggcttccgccaggaatcgcgccttggcgataaatttgccgccggcgatatccagctcgatcacgcatttgcggaataccgcatccggacagaactgcatcagatactggcgcgccaccagcccatacacgttccgctcatcctgcgtcagattaatcttgccggcgcgggcggtgggaatgatggcgtggtgcgcgtcgacctttttatcgtcccagcaacggttgcggcgatcgctgtcgatcaccggctgcgggtacagctcgggctggtgcacgctgatggcgttcagcaccgcgtggcggccggcgaaatgctcttccggcaggtagcgacagtcggaacgcggataggtaatcaacttgtgggtttcgtacagccgctggcaaacgtccagcacctgttgcgcgctgaggttataacgccgggccgcttcgatttgcagcgtggagagcgaaaacggcagcggcgcggtatctgattcccgtttatcgttataggacgtgaccagcgccggctggccctcgatgcgcttgaccacgtgctccgccaacggccggtgcagcaaacgcccctcttcgtcctgataaggctcgcacgactcgctgggctgccacagcgccacgaaacgctcttctttcggcgtaacgatgtgcgccttgacctcaaagaagtctttcggcacgaagttttcgatctcttcatcgcgccgcaccaccaaccccagcaccggcgtctgcaccctgcccaccgacaacacgccgtcataaccggcgttgcggcccagcagcgtataagcgcgggtcatattgatgccgtacagccagtcggcgcgtgagcgcgcaagggcggacacgcacaatgggatgaagtcacggttgtcgcgcaggcgttcaaccgcgcgctccaccgcctgcgggttgaggtcgttgatcagacagcggcgcacgttctggcgcttttccgccgtcaaatccaggtagtccagcacctcatccaccagcagctgcccttcgcgatccgggtcgccggcgtgaaccacttcatcggcttcgagcagcaactttttaatggcgttgagctgtttgctgaccgaaggccgcggctgcaaccgccatttttcgggaattatcggcaggtctgccaacgaccagcgcgcatagcggctgtcataggcgtcaggctgagcctgctccagcaggtggccgacgcaccaggtcaccacatcattgttgccgcaggcgatatacccgtcgccgcggcgatgcggcttgggcaatacgtcggcaatggcgcgcgccaaactcggtttctcggctatgaacagtcgcattattcaccgtttttctggctgaacgtcatcaaaaattctcttacttctgcatagttcccacggaagacaatccgctgggctttcttttccaactgatagcaatacatcggatcgtagtactgctgcaacaggggcgccaaccactcgcggtgcgcgtcaccctggccgctgagacgctgtgcccgcaacgccgcttccagccgctgcgtcagctgctggaagcgctccaggcccaaccggcggcgaatggcgaacaggccgtgatgcagatagtcgtcgtactgccgccagccttcttccacgccataggcctgttcgaactgttcgcgcatcccgtcgatatattcggcctgcaggcgtgccaggcgaatatcaaacggatcgtcgatcaccgccaccggcgcctgctgcatgccgttgaacaacggcaacggcagattgttgctgccgatgatccgcccttcgtcttccagcacccaacggcggctgccaccatgctgttttttcagcaataacacagccagacgattctcaaaatcgatctgtgagctttgccccgccagcgttcggccaaaagatgaaccgcgatggcgcgccgcgccttccagatcgacgccgtcggccagttcgttgaccagcagcgtcttgccgctgccggtattgccgcccaccagagccatcggcaatgccgcgctttgcgccaacacgccgagcagataattgcgcagcgccttataaccgccagtgatacgcgggtactcgacgccggcctcatgcagccattgctgcaccagctgtgagcgcagcccaccacggaagcagtaaatataaccttcgggtcgctgcgcacaggccgccagccaggcggcggtgcgctgttcgcgcagtttgccgttcaccaggctgtggccgagcgcaatcgccgcttgctgaccatgctgcttatagcaagtgcccaccgcctgccgctcgctgtcgaccatcagcggcaggttcaccgcctgagcgaaggcgccctgctgaaactcgatcggcgcacgcacgtcaatcagcggcacgtcgtgcagaaaaatgcgttgataatcggcgctgtccggcctgccttgcatcttggacactacacaacctcgatcagcggtttacctgcctgtgcggcatgcagctcaccgataggattgagcgtgatgccgtgctgctcggcaatcgccagcacctgcgcctgcgcctccggcaataccgccaacagcaaaccgccggaggtttgcggatcgcacagcagctgacgctgcaaatcgctcatctcgcccaccagatggccgtagctgtcgaagttgcgcccggtgccgcccggcacgcagccctcggcgatgtacgcctcgacatccggcagtttcggcacccgatcgaaccagaccgtcgcctgcagaccggagccctgacaaacctcgctcaggtggcccaacaggccaaagccagtgatgtcggtcatcgccgtgacgcccgccacttcggcaaagtcggcgcccggcttgttaagacgacacatcacgtccgtcgccagcccctgatgctcggggcgcagcttgctttgcttctcggcggtcgtcagcacgccgatgcccagcggcttggtcagatagagtttagccccggcccgcgcggcgctgttcttcttcacccgctcggtattaaccacgccggtgaccgccaggccgaagataggttcaggcgcatcgatggagtggccgccggccagcgcgatccccgcctgctggcaggcgaaacgcccaccgtcgatcacctgctgcgccacctccggcggcagtttggcgatcggccagccaagaatggcgatcgccatgatcggtttgccgcccatggcgtacacgtcgctgatggcgttagcggcggcgatacggccgaaatcgaacggatcgtcgacgatcggcatgaagaagtcggtagtgctgatgatgccgacgccgttgccgatgtcatacaccgccgcgtcgtcgcgggtttcattgccgaccaacagacgcggatcgacaaatttttcccgctcgctgtgcaggatggtttcgagaactttcggtgagattttgcagccgcagccagcgccatggctgtactgggttaaacggatcgctggcgatgtcatagtccactcccttcggtaacggcactcaagataacatagggtagcgcttgccgaggggattgataagagcgggccgccgataagcgaacggcctgctcagaaaccatgcaattttgcggggtttggcgcattttcgccgcgccccgttggataatacttagaaatagctgacgaaaggcgtgctgtccggcggcgtcactttagtggcggccttcagctgcggcgtgcccagatagaggaaaccgacgatctcgtcctgctcgcggcaaccgaaggcttcacgcaccagcgcatgctcggtccaggcgccggtgcgccagatgccgttaaagccctgcgccagcgccgccatctgcatcgcctgcacggcgcaaccggcggaaaccacctgctcccagcgcggcaccttggtctcttcagtgcaatgcgcgatgacggtgatgatcagcggtgcgcggaacggcgccttggtggctttttcgatcgccgcttcatccaactgatcctgcttcgccgccgcctgcagcagctgactgaagcgctccaggccctgattctcgatcatcacgaaacgccacggctgcagcgcaccgtgatcgggcgcacgcaggcccgcgttgatgatgttttggcgcacttcccccgccggcgccggttccgccaggcgcgaagccgagcgacgattcaataaaagatccagagcatccatcgtaaactcctgataacaattttcattccggccacgttaacatagctaaacggcgagttacagcctcggcgatagcgtctgtgtgccacgatttaaagctgacatttacccggccgctcattaggatagcggaacattctcgactcttgttggagagcacatgcgcacattgtggcaaattattgccggcattttccggtggacatggcgtctgctgaattttatcagggaactgatccttaacctgttcctggtcctgctgatcctggttggggtcggcatctatctgtccttccaaagttcctccacctcgacggccccggcgcgcggcgcgctgttggtcgatttaagcggcgtggtggtcgatcagccttcggtaaacaaccgggtgcggcaatgggggcgtgaactgttgggcgcctccagcagccgcctgcaggagaactcgctgttcgacgtggtggacagcatccgcaaggccaaagacgacaaaaacattaccggcatggtgttgcagctgaatgacttcgccggcgccgatcagccgtcgctgcgctatatcggcaaagcgctgcgcgagttccgcgacagcggcaaaccgatcttcgccatcggcgacagctacaaccaaacgcaatactacctggccagctacgccaacaaggtcttcctgtcgccgcagggcgcggtcgatctgcacggtttcgccaccaacaacctgtattacaagtcgttgctggacatgctcaaggtcaccaccaatatcttccgcgtcggcacctataaatcggcggtcgaaccgctgatccgcgacgatatgtccccggcggcgcgcgaagcggacagccgttggatcggcggcctgtggcagaactacctggagaccgtggccgccaaccgccaactgacgccgcagcagctgttcccgggcgcagccggcgtgctgagcggcctgcaggcggccggtggcgacaccgcccgctatgcgctggacaataagctggtggacgagctggcgtcgcgcaccgcgatcgaaaatcagctggttaagagcttcggctgggacaaacaggcgaacgatttcaacgccatcagcatctacgactatcagccgaagccggacgccaaccagggcggcaagatcgccgtggtgttcgccaacggcgccatcatggacggccagcagacgccgggcaacgtcgggggggacaccaccgccgccgagctgcgccaggcgcgtctggatccggccgtcaaggccgtggtgttccgcgtcaacagcccaggcggcagcgtcagcgcgtccgaagtgatccgctccgagctggccgccgtgcgcgccgccggcaaaccggtggtggtgtcgatgggcggcatggccgcgtcgggcggctactgggtctcgacgccggccgactatatcatcgccagcccgagcaccctgaccggttctatcggcattttcggcatcatcaatacctacgagaaaaccctggatacgctgggtgtgcacaccgacggcgtggcgacctcgccgctggccgatatcgcggtcaccaaggcgctgccgcaggagttctcgcagatgatgcagctgaatatcgaaaacgggtataagaacttcctcgatctggtcgccaaatcacgcaagatgaccccgcagcaggttgaccaaatcgcacagggtcacgtctggctcggcagcgacgccaaggccaacggcctggtcgatcagttgggcgatttcgacgacgcggtgaagaaagccgccgagctggcaaagctgcagcagtggcagctcgactggttcgtcgataccccaagcctgagcgatatggtgctcagccagtttggcgtttccattcacgccatgctgccggccgcgattcaggccatgctgcccgccccgctggcttcggtcgccaacgcggtgaaagaacaacctggcttgttcaataacctgaacgatccgcaaaaccgttatgcgatctgtctcacctgcggagaagtccgctaacaaataattctgcagcccggccaccgccgggctttttttctgccgccatgtccctataattcagcccatcttatctttgttaaaatcataaccatgcaaaagaaatccatttacgtcgcctacaccggcggcaccatcggcatgcagcgttccgagcacggctatattccggtttccggccacctgcagcgtcagctggcgctgatgccggaattccatcggccggagatgccggatttcaccattcatgaatacgcgccgctcatcgattcctcggatatgacgccggaagactggcagcacatcgccgacgacatcaaacagaactacgatcgctacgacggcttcgtgatcctgcacggcaccgataccatggcgttcaccgcctcggcgctctccttcatgctggagaacctggccaaaccggtgatcgtcaccggctcgcagattccgctggcggagctgcgctccgatggccaaaccaatctgctgaatgcactgtacctggcggccaaccatccggtgaacgaagtcagcctgttcttcaacaacaagctgttccgcggcaaccgcaccaccaaagcgcacgccgacggcttcgacgccttcgcttcccccaatctgccgccgctgctggaagccggcatccatattcgccgccagcaaggcatcgacagcccggcttgcaacggcgcgttgcaggtgcatgacatcacgccgcagccgatcggcgtggtcaccatctatccgggcatttccggcgcggtggtgcgtaatttcctgttgcagccggtcaaggcgctgatcctgcgctcctacggcgtcggtaacgcgccgcaaaaggccgagctgatcgacgagttgcgtgcggcctctgaacgcggcatcgtggtggtcaacctgacgcagtgcatctccgggcgcgtcaatatggaaggctacgccaccggcaacgcgctggcgcatgccggggtgatcagcggtttcgacatgacggtggaagccgccctgaccaagctgcactatctgttgagccagccgctgacgccggaacaaatccgcgccctgatgcagcaagatctgcgcggcgagctaagcatcaacggttaacctactgaactctggagcggcgatgaaaacggccctgttgttgatcgatctgcaaaacgatttctgccccggcggcgcgctggcggtcacggagggcgacgccgtcattccggtcgccaatcaggcgatcgccgcctgcctggcgcggggcgagccggtggtggccagccaggactggcatcccgccaatcaccgcagctttgcggtgaactcccatgcgcaggtcggcaccctcggcgagctggaaggtctgccgcaggtgtggtggccggtgcactgcgtgcaagggagccacggcgccgattttcattctcaattgcagcggcaacacatcgatgccgtttttcgcaaagggcaggatacgagcatcgacagctacagcgcgttcttcgataacggccaccgggcgcagaccgaactgcacgattggctgcaatcgcagggcgtccggcggctggcgatcatgggcctggcgaccgactactgcgtgaagttcagcgtgctggatgcactggctgccggctatccgacgcaggtgatcgtcgacggctgccgcggcgtgaatctgcagccgggcgacagtgagcaagcgctgcaggacatggcgcgcgccggcgcacagctagttaccctgtcacagtttctcgccaactaaatcctctcgggcgccaccggcgccctctctacgcagcggcgaaattatcgacgccgctcacaataccacctttcttcttccccaacggcttgtgaccggcaggcgcttttgctgttatggctgcgacgcttttggcgtcaatcggttatacgcatccggggcccactgagcccggctttattgtgcccgcccctggcggtacggtcggccttgccgaccacaaggagacagacatgaaaataacccgaaaactgctgcctttgctggcggcggtgcaattggctatggccggcgcaagcacggcccaggcggcctatctctccgtcggctacttcaacggcggcggcgacgttaccgccggccccggtggtgacatcgacaagctggacgtgacgcaaatcacccatctcaactattcgtttggcctgatctacaacgacgagaaagacgaaaccaatgcggcgctgaaagaccccgctcgccgccaccagatctacctgtcgccgaaagtcacggccgatttgcaacggctgccggtgctgcgcaaacagaaccccgagctgaaagtgctgttgtcgatcggcggctggggcgcacgcggtttctccggcgctgccgccaccgcgggaaaccgggcgattttcattcgctccgcggtgcaggtgatcgagcagtacgggctggatgggatcgatctggactgggaatacccggtaaacggcgcctggggtttggtggaaagccaaccggcagaccgcgacaacttcaccctgctgctgagagagcttcatcaggcgctgggtaaaggcaagctgttaaccatcgccgtcggggccaacgtcaaaagcccgcaggaatgggtcgatgtgaaaagcattgccccttacctcaactacatcaatctgatgacctacgacatggcttacggcacgcagtacttcaatgccaacctgtacgattcaaagcgctggccaaccgtagccgccgccgaccgctacagcgccgattccgtggtaaaacattatctggccgccggattaaaaccggcgcagatgaacctgggtatcggtttctacggccgggtgccgaaacgagcgaccgagccgggcatcgactgggacaagccggacgccgccaaacatccggtgacgcagccttatttcagtgcgcgagaaaccgctctgttccgcacgctggggttggatctcagcaaagacacttactttaaataccacgatatcgtcagcaaattgctcaacgatccgcagcagcgttttcgcgaacactgggatgacgacgccaaagtgccatacctgacgctgcaatccgccgaaggcaaaccgctgttcgccatctcctacgagaacccgcgttcggtggctatcaaagccgagtacatcaaaagccagggattggggggagcgatgttctgggagtacggcgcggacgacaataaccggctggcgcaacagctggcggagtcgctgggaataaaaggcgagaaacggtaaatcgacgggggcgatggcgacatcgccccgctttagggacagcttactgcggtttaagtttgaccagcggctcggcaacaaactgctgcttcagttcttgcttgctcttcatcacgatctgcccgtcggtgccgatgctcatgtgctgcggatcgacgttgttcatcgactgccacagcatcaccgcctgcaggctgttttccttctgctcaggcgtcagcgccacgccgtccggccacttgcccagctcaaccgcctgcaccaggcgctggtatatctcgggcgtcatcgccgcaatcagatctttcacgtccatcagagcccttctcgcttacagatgaataattagctgaatcgattttgttgattaaattaccacttaaccggccgtttggtcgccattttcgccatcggtgaaactcagcgaggcggagttgacgcagtagcggtcgccagtcggctgcgggccatcagggaaaacgtgccccagatgcgcgtcgcagtggccgcagcggatttcaacacgatgcatattatgtgaattatcatcaagataacggattgcatcggcggaaaccggctcataaaagctcggccagccgcagccggaatcgtatttggtttcggaatagaacagcggctggttacagcacaggcaatggtacacgccctcgcgcttgttgtgcagcaatttgccgctgaacggcgcttcggtgccacgctgttgcgtcacataacgttggatttcattcagttccgtgaccggatgaccgggggttgtctctttagccatttgtgcttatctctgaatgtggataatgtcaacgaaaacaatgattaataataacaaaaaattaacaccgctgcaggggtttttggcctaaactgtagcccataaaggccacgtcacgatgatatgtgataaagatcacacatcttgcgtatgctgactttatacttggcggcttgtccccatataacggatgaggccgagcgcaattggactgtgcaataagcgtgcaaaaccacccttccggtttgacttgccgcaagtattgacacgattccgcttgacgctgggtaaggtttttgtaattttacaaccaaccttttattcactaacaaatagctggtggaatatatgactatcaaagtaggtatcaacggttttggccgtatcggtcgcattgttttccgtgctgctcaagagcgttctgacatcgagatcgttgcaatcaacgacctgttggacgcagagtacatggcttacatgctgaagtatgactctactcacggccgtttcaacggtacggtagaagttaaagacggccacctggttgttaacggcaaaaccatccgtgttaccgcagagaaagacccggctaacctgaagtggaacgaagtgggtgttgatgtggttgctgaagcgaccggtatcttcctgaccgacgaaaccgcgcgtaaacacatcaccgccggcgctaaaaaagtggttctgactggcccatccaaagatgcgaccccaatgttcgttcgcggcgccaactttgacaaatatgccggccaggacatcgtgtccaacgcctcttgcaccaccaactgcctggcgccactggctaaagtcatcaacgacaacttcggtatcgttgaaggcctgatgaccaccgttcacgccaccaccgctactcaaaaaaccgttgatggcccgtctcacaaagactggcgcggcggccgcggcgcatcccagaacatcatcccttcttctaccggcgcagcgaaagcggttggcgtggttctgccagagctgaaaggcaaactgaccggcatggcgttccgcgtaccgacccctaacgtgtccgttgttgacctgaccgtgcgtctggaaaaagcggctacctacgaagaaatcaagaaagccatcaaagacgccgctgaaggctctatgaaaggcgttctgggctatgttgaagacgacgtggtttccaccgacttcaacggcgaagtactgacttccgtgttcgatgccaaagccggtatcgcactgaacgacaacttcgtgaaactggtttcctggtacgacaacgaaaccggctactctaacaaggttctggatctgatcgctcacatctccaagtaatggcatgatgttaagctgataatgagggcgacatttttgtcgcccttttttatttgtatctccggcaaacaataggtcatgaaatgaacgagaaaattttcaccctgcccgtttccgaacaaatttctccttatatcagccagcggcaactcgatgagctgggcgtggttgtggtgtcgcacccgaaagtgcgcgcggccgtcgcgctgcaaggcgcgcatttgctggcctggcagcccagcggtgagcagccggtgatttggctcagcaacaacacgcctttcgccacaggcaaggccatccgcggtggcgtgccgatctgctggccgtggttcggcccggtggcgcaaccctcccacggctttgcccgcaaccagccctggagcctgacggcgcacgatgaagatgagaacggcgtcatcctgacctttacgctgaaagacaatgagcagacccgcaaactgtggccgcacgccttcacgctgattgctcgcttcaagctgggtgaagagtgcgagatcgagctggaatcgcacggcgattatcaagccacggcggcgctgcacagttacttccaggtcggcgaaatcgatcgggtcagcgtggcgggcctgggcgagccttatatcgacaaggtggcgggcggcgcagaggcgcatcagacgggtgaagtgacattcatcggccaaaccgaccgcgtctatacccgcccggaagctttcagccagatccgcgatccggcactcgctcgcaccatcgaggttcaccaccatcatatgagcgacgtcatcgcctggaaccccggcgtggaactctcctgcagcatgggggatatgccgaacgacggttacaagaccatggtctgcatcgagaccgggcgcgtcagcaaaccgctggtcgctgccggcgagcaacccgcccgtttgggtgtcaccttccgcagtcgtaagaaggcctgaggaaccgtgcgcggaagcgcactacagatgtgcaaaaggggcgccagcgcccctttttgatgcacgacatgcacgatagttgtgcaatgcgtgattagaaggtgtagctcacacctgtcatcaacaaaccggtgtaagatttatccaccatcgggctgtctttcacttcatccgacaacttcacatagcggccgacgaagaaggcgttccagcttttgttgatctgataattggcgctcagctcgagatacggagcccagctatcgccaggggtgtagctgtccaggccgctgcgacgtgattcattggcgctgacgccgtagtaatatttgttctggttcttgctgttccacatcacgcccacgcccgggaccagcgtcagcgcgtccagatcaaacttgtacagataagcaacatcgcccaccagcccgttgctgttgttcagcgtgtcgccggtgaacgtggtacgaagggtgccccattccgcgttgtgcgaataggccaggccggccatcagcgtgccgcgacgcttgtcgaggcgcttcatgcgatcgtcgtcgctgtcgcccggacggtagccccatggcgtgtagtaacccatgatgctcagctggttttcttgatctttccacaggtagtaaccggcggtcagagtacggaagtagaagtcgtcaccttcatagtcgatgacgggcaccggataaacgcggtcctgataaccgcgatacgcgtccggactaaccagcgcggcagcaccgagtgaccaggtccccgcctgagcactttgcgcacaaaccattgcggaagcgataattgctagcgttttgagttttgaaatcttcactggttctttttccataaattacagggttaatagccgcgatagtttatgtgaaaatttagttgcgtgcctaatctttacaaaggaaaacgaccaagatcgaataacttatagcggaattatgaattaatcatggcggaacgatgacgttttatcccgcaggccgcgccagacaaggcatttggttatcccggcaataactgagtcattgatatgacttaaaaaaagctttttctgcggcaggaaattttccggcaagcaaactaagcttaaatcagaaggtgaatttatcctgggcccagtggcatacagcgcaactcgcgataataagcgcaccaagttggcatacgggttgctgtactcaggcgtattctcatctttcgggagccagaacactatcacacgctctctttaacctgtgctaataacgaaaggacgggcatcatgaacatatttgaccactatcgccagcgctacgaagctgccaaggacgaagagttcacactgcaggaatttcttaccatttgccggcaagatcgcagtgcctatgccaacgcggccgaacgtctgctgatggctatcggtgaacctgtgatggtcgacactgcgctagaatcacgcctgtcgcgcctgttctccaaccgcgtgatcgcacgctatccggccttcgaagaattctacggtatggaagaggccatcgaacagatcgtctcttacctgaagcacgccgcgcagggcctggaagagaagaaacagatcctttacctgctgggcccggtgggcggcggtaaatcctcgctggcagaacgccttaaagcgttgatgcagcgcgtgcccatctacaccctcagcgccaacggtgaacgcagcccggtcaacgatcatccgctgtgcctgttcaaccctcaggaagatgcctcaatcctggaaaaagagttcaacatcccaagtcgctatctcggcaccatcatgtcgccgtgggcggcgaagcgcctgcacgagttcggcggcgatatcaccaagtttaaagtcgtgaaggtgcgcccttccatcctggagcagatcgccatcgccaaaaccgaaccgggcgatgagaacaaccaggacatctcggcgctggtcggtaaagtggacatccgtaagctggagaaccacgcgcagaacgatccggacgcctacggctattccggcgcactgtgccgcgccaaccaggggattatggaattcgtcgagatgttcaaagcgccgatcaaagtgctgcatccgctgctgacggcgactcaggaaggtaactacaacggcaccgagggcatctccgccctgccgttcaacggcattattctggcgcactccaacgaatccgagtgggtgaccttccgtaacaacaagaacaacgaagcgttcctcgaccgcgtgtacatcgtcaaggtgccttactgcctgcgcgtgtcggaagagatcaagatttacgacaagctgctggatcacagcgagctgactcacgcgccctgcgcgccgggcaccctcgaaacgctggcgcgctttagcgtgctgtcgcggctgaaagagccggaaaactcgagcatttactcgaaaatgcgcgtgtatgacggcgaaagcctcaaggataccgatccgaaagccaagtcctatcaggagtaccgcgactacgccggggttgacgaaggcatgaacggcctctccacccgtttcgcctttaaaatcctctcgcgggtattcaacttcgatcacgccgaggtggcagccaacccggtgcacctgttctatgtgctggagcagcagatcgaacgcgaacagttcccgcaggatttggccgagaaatacctcgaacatctgaaaggctatctgatcccgaaatacgccgagtttatcggcaaagagatccagaccgcctatctggaatcctactcggaatacggacagaacatttttgaccgttacgtgacctacgcggacttctggatccaggatcaggagtatcgcgaccccgacaccggtcagctgttcgaccgcgagtctttgaacgccgaactggagaaaattgaaaaaccggccggcatcagcaacccgaaagatttccgcaacgaaatcgtgaacttcgtgctgcgcgcccgcgccaacaacaacggccgcaatccgaactggaccagctacgagaagctgcgcaccgtgatcgagaagaaaatgttctccaataccgaagagctgttgccggtgatttcgtttaacgccaaaacctcgacggacgagcagaaaaaacacgacgacttcgtcgaccgcatgatggagaaaggctatacccgcaagcaggtgcgcctgttgtgtgaatggtatctgcgggtcagaaaatcctcataacgcctcaggtaagcggcattatcagggccatgtccacagtcatggacgttgcagcgcagcccaaggaggggcttacacattgcgctgtcgcgaccgggacatgaagagttggcaacgtcgtttgggggaagtatggcctatttcattgaccgacggctgaacggcaaaaacaagagcatggtgaaccgccagcgcttcttgcgccgttacaagtcgcaaatcaaacagtcgattgccgaagccatcaacaagcgttcggtcaccgacgtagacagcggggagtcggtctccatccccactgacgatatcaacgaaccgatgtttcatcaggggcgcggcggcacacgccatcgcgttcacccaggcaatgaccacttcgtacagaacgatcgcgttgagcggcctcagggcggcgcaggcggtggcggcggccagggcaacgccagccaggacggtgaaggccaggatgaattcgtcttccagatctccaaagacgagtacctcgatcttttgttcgaggatctcgccctgcccaatctgaaaaagaatcagtacaagcagttaaccgagttcaaaacccatcgtgccggctataccgccaatggcgtgccggccaacatcagcgtcgtgcgttcgctgcagaactcgctggcgcgacgaaccgccatgaccgccggtaaaagacgcgcgttgcacgagctggaagatgcgctgacccagttggaaaataccgagccggtgcaattgctggaagaggagcggctgcgcaaggaaattgccgaactgcgcaagaaaatcgaaagcgtgccgtttatcgataccttcgacctgcgctacaaaaactatgagcgccggccggagccctccagccaggcggtgatgttctgcctgatggacgtgtccggctcgatggaccaggcgaccaaagacatggccaagcgtttttacattctgctctatttgttcctgagccgaacctataaaaacgtcgaggtggtctacattcgccatcacacccaggcgaaagaggtggacgaacaggagttcttctattcgcaggaaaccggcggcaccatcgtttccagcgcgctgaagttaatgaatgacgtagtcgaagagcgttatgacccggcacaatggaatatctatgccgcgcaagcgtcggacggcgacaactgggccgacgattcaccgctgtgtcatgagctgttggcgaaaaagatcctgccgatggtgcgttattacagctacatagaaatcactcgccgcgctcaccaaacgctgtggcgcgaatacgaggatctgcaggcgaaattcgacaacttcgccatgcagcatatccgcgaaccggacgatatctatccggtattccgcgaactgttccgtaagcagaccgtgtgaataacgccgcgtgaatgtcaccacagccggaaagcaccgttttccggctgtttctttttcgcattatatatttgcaaaacccatgtttattttttaaacaatgacaacaacaataataagtcagattccccagaacggtcctctctattatttgttcttctgaggttattcctaaacatccgccgctccccccgcacggcttgataggaatattcccattcagttatcgttaccccatcgcttaagtctcttcctaagcgaaatttgcctcattttatttttctatggcttctcagcccgctgcggcgggcatttacctgtcagcaggttagacatcatgatcgactacaccctctatggcctcaacaagcacgatgttgatgaataccataagcaaatatgttgcctgctcggcaaaaacgtgctgctggtgttgaccgccaacaagccgataaccaaacagaacctgctcgccagccttatccaggagatagaaaagcagcccgatgattattttcagcggctgcatcgcgcggcaatagaaatgatcggcgttaacggacgctaaggcgatatgcgtaaggcagacctctacgccattattgccgtcgccgtcgtgttgatgatgctgttataacgatatcagcgaagggataatctgccgcagaatgtcgagccttcctgcccctgctttatttcaaaccggccgcttcgtcaatcaaacccgccacctcatcggcatgcgaaaccagcgaggcatggctggcattcagcaccatcactttcttggcctgcagccgctgcgccatgcgccgctgattctccggcgcgatcatgcgatcgtcgctggaaagttgataccatgacggcttatgtttccaggcgggctcgccgatggtgttgccaaaggtctcggccagcggggccttctgcgccaccgccatcaccaatgcctcgtcggcggtcagatcctggcaaaagctttcgtgaaacttgtcggttttaatccacagataaccgtcgctgtccgaggccagattctcgactgccgcaggaggatgcgcttgcgtaataccgccggcactttcaccggcatccggcgcaaacgcggcgatgtagaccaggccaaccacgttaggctggttgcccatttccgtgatcacggcaccgccgtaagagtgcccgaccaacaataccggtcccgcttgctgcgcgaccatcttgcgcgtacgttccgcatcctcagccagcgacgtcaacggcatttccaccgcatgaatcgccgtatatcccctgcgcgacaactcgatgatgaccttactccagtgcgcggcgccgccccagaatccgtgtaccagcacgatagttggttttgtgctcattgccgactccttcatctcataggaaagcgccgcaggcagatgaacgcccccgcaaggggcgagcctggctgccttcgacgccacgcagtcccccttttatatagtcagcctcatggcgttcagcaatagctacgacgagttaacgtccccgattttccaccgccgccacggcttatcgaagcggcttacgccgcacggccgggaaaaaaaaggattaaaactaggatttttacccataccgatctaaaatttcgcgcaaaaacaaagagaagtaaatttggctcaccgggaaaaggaatgaagttgtgaaggaaatgatctccatcgtttttatggcatgcctgctagcgctgctgttttcgtggctgttcgtctacggtcttaacattcattaaacccataacgacaaccatccccctccctggcaggcaagcggcgtatcgcgactgatgcgctaaaaccggcgcctgaagggttcacgtaccgccaaacccgacgccacctcaccttaaccttgctgtccgcaaatacatcattaatctttatgagtcataaccccaccgcgtttcccccttcaccgactcttttactactcagcggagttcactccagaaggatggctcgcctgacgcaaaatgttaccggtaactatgctgttgatttcttttggcaataaacataaggccgctaataaccctacgttctttatagaaataaattatgcatacttatggataaaggtttgaataaagggcctttggtcattgattatcacccgccaagctcctagaattcgcgcgtaaaaatacaactgggatcgggtttcatgtcgccgctgtgggtcgcaacgcaatactgttattttattggtctgttagtttctatggttttcacctacctggttagccgggacaccgtcaaaattcgctgtatcagcgcactgaccatcgggttaacctggccgttgagcctgccggtggtgttgctgttttcgctgttctaacgccccaatgccgcgcgctggcttttaaacagtcatattaatgaaaagaggctgaccaccggcgtcatggtttttggcgtgggataaaaaagtgccagcgcaaggctggcatgaaaacgggaagcaatgtgagcaatgtcgtgccggatcggggggctcagaaggagacaacccttttcccctcactggtgaataaaatgataatacgtctcattattgaatacaaagtcatttccccaggcaactttcccccttgagaaactatcagccgcgcggcgatcgccagcgctgatacaatcgccccgccccccacaccagcagccagagcaaagcgttcaaccccaaccatagcatcagcaagtagaagaaagtctgatagccgggtatgccccgatcggccaaaaacgggttgaagtgaaaaaatttgacgatcgcgaacggattaagattgaaacggttgaacacgaccgccgtcagcaacggtggcaacagcgtataaaacgccaggctgaacagcagcaggatttttgtgcccgaagtgtttttataatctttcatatcaataaattatatctgtcatcatagtgcaaaaaccgccaggcattcgtacgccaatcgaccccgcgggcgcaaaagagttccaggccaacgcggaaataaagccgatcccgcgtttaattgtcatttagcgctcgggtgatatataccctgtggattttaaattacgatgtcgccgcgccgtcttcaagcacagcgtttacatggcatcatcaggaggcattaatgaaaccggacgcactctccctgccgccgaccccgaaaaagctcaaggtcatctacggctggtatatttatgtgatctatatcctgctggttttcaacatttatatggcggtctacaacgtctgcgttcggcacccgatcgaggccccgctgctgtcgctgtttcacagcctgtttctcgcgttgatgctgcagcaggtgctcaagaagaacgtcgttttcgcctggatcttgctgagctattttattctgatgcgcctgtattacgccaatgtgctgcatgttgagttcacgctggtgagccgttgcctggtgctgctgattctgacgctgctgctgaccggcgccgtagccgtcgggcaactggccacgccgccgcagcggcatgactggctggcgcggctgggctggcggcaatggggggcactcacggcgctggcggccatcctgacaccgctgattaccaccgactatctgggataaactgggggctatttgggaatatgaggttcggaaatgtctacgacgcggcatattttggtgtagttacccgccttctcacagatcttgtccgtgacgaacatgctaaggtagcccagcaacagcaagtagccgaccatgcacagaataaagataagcgttctcaccgatagcgaccaacctgacaagagtatcacgagcatcataacctgaacgaggcgctttaaaaggatttcatgtgcgcaccggccgcatcggcgcacgttctgtagtaacattaagccaccacgcccaccaccggaaacgccgatgcaccatctgatgttagacattgaaaccctggatataaaacccagcgccgtcattctggtggttgcggcggtgtttttcgatccccggaccggggaactcggcgccgaattcgaggccgccgtcagcagtcagaaagaccaaccgggccgtaccatcagtctggacacggtcgcctggtgggcgaaacagtccgatgaagcacgcaaacaggccttcggcggcaccgagagcctaaagcgcgtgctgagcagcctcagccgctttatccatatgaacagcaccgatacggtaaaggtctgggggaacggcaaagagttcgactgcgcgatcctcgaacacgccttccagcagttggaaatgccctgcccgtggaagttttgggatactcaggacgtgcgcacggtgatcacgctggcggaactgcatggctttaacccgaaaaaggctcgcccgttcgaaggtatgccgcatcgtgcgctggatgatgctcgccaccaggcccgttatgtggccgataccgtctcggcgctctattatcgtcagggggcgcagcgctgacccgctttgccccttttcatttgccgccagagtctctactctagccctctttgtcactcggacgtgccttttctgttatgcaaaagtttctgtttatgcttctcagcctggtgctgctcggcccattaggcatcgatctttatctgccgactattcccgctattgccgtcggtctgggcagcagcgaagcgttgatccaatccaccatatcgctatttattctggtacttggcctcggccaggtcatcgccggcccgctggtggataactatggccgcaaaccggtggcgctggccggcattatcctctacatgatcggcgccgcgatggcggcgctggccaccagcccgacgattttcatcgcttcgcgtctgctgcaaggggtggcagtttgctgcaccgccgtcgtcgccttcagcggcgtgcgcgatcgcctgaatggcgacgacgccgcccgcgctttcggctttcttaacggcacgctgaacatcatcccggcgctggcgccgctgctcggcggcctgctcgccgaagccttcggctggcgcgctcccttctggttcctggtcggctacgcgctgctggtgttggcgctcatcgcgctgcgcctgccggaaactcgccccgccgacaccgtgccggtcaaggggttgccggtgcgtcaatacgcgcgcatcctcagcgaacggcgtttcctctcttttgcggtggtgaactccggggcgatgggcatggcgctgacctacgtttctctggcaccgaacgtgctgatgggcaccgccggcctgacgccgctgcaattttcgctggtgttcggcgccaacggtttctggatcatgctggtcagcttcttcgccaaccgcatcatccacaaggtcggccgtccggtttgtctggcgaccggcggcatgttgatgggactgggctgtctgggcctgctgctgggcgtcatgctgctgcccgcgacggcgcaaacgcactggctgacgtatatgctgccagtcgccagcgcctgcgccgggttggcattcgtgatgggcccggccaccagctacgcgttggaaccctactccaatgaggccggcgtcgcgtccgcgctggtcggtttcgtgcagatggcgggcggcgccgcgctgggtctggtggcgatggcgttgccgctgcaacccaagctgtcgctggcgctggtgatgctggcgggctgcctgctggcgctgcacgcgcggcggctcagcaagcagattaaagggcagatcagaaaagtcgcctgagccccggctcaggcttcgatggcgaccggcactcgcgccgctaacgccgacagcagttcatagcctaacgtccctgccgccgtggccacctcatccaccggcaggcgtttcccccacagctcgacttcggcgcccagttcgacttgcggacagggcgtcagatccaccgccagcatatccatcgataccgttcccagggtgcgcgtcagcacgccgccaacccataccggcgtaccggtcggcgcatgacgcggatagccgtcggcgtaaccgcaggccaccacaccgatacgctgtgcgcctgcggcgctgtaacggccaccgtaacccacacgatcgccagacttcagctgctgaatgccgatgatttcactgctcagcgtcatcgcgggctgcagccccgtcgccgcaatgtcattccagcaaccgctcggcgaagcgccatagagaacgatcccaggacggatccaactgccgtgggtcgaagggtgccacagcgtggcggccgagttggccaagcagcgcggcaacggtatatcgttagccgccgcctcgatggtggccatctgctgcgtcacgccttcggggccgtcggcggtggcgaaatggctcatcagcgtaagctcggcaatgttggctaccgcctgcgccctgcgccacacctcatgcagccgctcgggtgcgaaccccagccgattcatgccactgttcactttcagatagacattgagcggcgcgttcagcgtggcgtctgcgatcgccgccagttgccagtcgctgtgcaccgccgtcgtcaggcgataacggtcaagcaacgccagatcctgcggctggaagaagccttccaacaacaggataggcccttgccaacccgactcgcgcagcagcaccgcttcggccagatccagcatggcgaagccgtcggtttgcgccatgctgcgccaaacgtgtttgatgccgtggccataggcgttagccttgaccaccgcccagactttggcgccgggggcgaaacggcgcaccacctgcaggttattttcaatcgcgccgagatgcatcgtggcggttatgggacggggcatcgcttctccttggggcagcgtacggcggccacgcgcgcctgcgcgtggccgggaaagtctatgacagagtcaacgattaacgtgcgggatgcacgtcgttcagcggaaccgcgtgttgctgacgaaacccggcgctgtaacgcgccaccgccaggtcatcggaagggatcgccggcgtaatgccggacatcagatcggacaacaactgcccggagccacaggccatcgtccagcccaacgtgccatgcccggtattgagatacaggttcttcagcgaggtgcggccgacaattggcgtaccgtccggcgtcatcggccgcaggccggtccagaacgctgcctcttccactcggccgccgttcgggtagagatcgcgcaccaccatttccagcgtttcgcgccgtttttgctccagctgcgtattgaaaccgacgatctccgccatgccgccaacgcgaatgcgctggtcgaagcgtgtgatggcgattttatacgtctcatccaataccgtagagaacggcgccgccgcttcgtcggtgataggaatggtcaacgaatagcccttcagcgggtaaaccggaatggacaccaggccgcgcagcagtgccgtggagtatgagccgaacgccaccacatagctgtcggccttgaacacttcctcgccgcactgcacgccggcgatcttgtcgccctccaccagcagacgatcgacgctgcggttgaacaggaaggtgacgcccgcctgctctgccatcttcgccaactgttgcgtaaacagctggcaatcgccggtttcgtcgttcggcaactgcaggccaccggtcagcttgtgcgccacctgcgccagcgccggctcgacgctgccgagctggccggcttccagcaatctgtaaggcacgccggcatcttccaataccgcaatgtctttcgcggcgttttcgaactgttgttgagtgcgaaacagctgcagcgtgccgccctgacgaccttcgtactggatgccggtttcctgacgcagcgccttgatacaatcgcggctgtattccgccaggcgcaccatgcggcctttgttggtcatgtagtgttcggtgttgcagtttttcaacatctgccacatccagctcagctggaagctgctgccgtcgaggcggatggccaacggcgcatggcgctggaacatccacttgatggccttcagcggcacgcccggcgccgcccagggggcagcataacccggtgaaatctgcccggcgttcgccgcgctggtttccagtgcggggcctggctgacgatcgatcaccgtcacctcatgccccgccttcgccaaataccaggcactggctacgcccaccactccactacctaaaattaccactcgcatcgctgactccagcccaaggcttcacaaagcataatcttctgcttacaggaaattaactcagtgaaaaaatccgtccaacaacttcgtcatcaaacgtgacaatattcacaattaatttatcgtcgatgggccatgtatttgcaatagccgtctgcaaatagcgataagatgcggtttagaagggattatggcgtcataccgccactgaattgacatcaacgctatcaatgatagcactcaaaaaaggcgtaataagcaacattgatttaacagaatataaaaataccagccaacacttaaatagaataaaaatctaataaaataaaaaataccaacataacaaacaaagagagccccctccctccgcagcagaaaaatcgcgcaaaatttcagctaccgttaaccttgcttttagtgccggaataaaacacccgagcccttggcccgccgtttatgttgaacgctgcagcacgatatgaacgttaaagccagaagcagcgcctaaagttcacactgtcgctattgtggagaacgtcttatgttcatcgccatctaccagttttcagtcaaacccggacacgagcacgcctttcgccaggcttggctggcgttgacccaaggtatctatctgcagcgcggcagccttggctcgcgcctgcatcgggatgtgggcgggcagtttatcggctatgcgcaatggccaagccgagtcgcatgggaaagcgccggtgatattcagttggatgaacgctacctgcaagcccgggaacgaatgcgtgcgaccttgttggcagataaaacgctatttgaaatggaagtgacggacgattacctgcaaatcagaccgtttgactgagcacaagcccacacaagcgggcttgtggttgcgggaacgagcagcattaatgatgcagcatctcatccacgacttctttggtttgcagttggaatgggtagtaagtcggccagttatccatctctttcagcaacgcttcctgcgacgtgttgcccataaagatatggaaatgcgccgatttgcgcgggccgataatgtgatcgctgaactgcacgaatttcggcgccaggctgccggcatcctggcattcaaacagataacgcacgccctttttaccggaaacatacgtcaggatcttatgcccggcgtacttatactgacaggcgctggattggtcaccgcggtgaaattccatgatgccgttttcaatgccgatggtatccacatcggtggcataccctttgcggtaatacgccttcacttcggcgaaggtcttgcgcttgtcctgtgccgctttcttcttgaacaccgggtcaagatccccattgagcagatagggatacacggattgccacacgccctcccagtcggccagatcgcgatctttgacgtccttatcgtcgaacacgcctccctccgcctttttttccgcctccgtcagcggcttgccatgtgaatgatgcccgtgggcgcatgcctgcccgctgataaacaacgcggccagcgccaccgccagtttgccaaaatgcctcgccaaaatgcgctccttgtccgttatcgagaaaaattaaaagttacaatataacataacaattttcaatccttgtcgtgcatcaggcattgtgttgcgcccccctgccgcagggttatactcgaagaggaagtgcggtgccgcaccgccttctgccgggacaggcgccggattgaccgccgttcgctcctttgcgtaccggcatttttatttcactgatttgcaatggttaattatgacttgaactatgcttgttacagggtctgccgtttgagcaagacccgtgaataatgagggtgcgctgatgactacttcaacacatgaaaaggttaaggatgataaacgtctgagcgatggaccggactggacgttcgaactgctgcaggtgtatttggagcagatcgaccgcgtcgccaagcattaccgactcgacacctacccccatcaaatcgaggtgatcacctccgagcagatgatggacgcctattcgagcgtcggcatgccgatcaactatacccattggtccttcggcaagaagttcatcgaaaccgaacagcgctacaaacagggccagcaagggctggcgtatgaaatcgtcatcaactccaatccctgcatcgcctacctgatggaggagaacaccatcaccatgcaggcactggtgatggcgcacgcctgctatggccacaactcgttcttcaagaataactatctgttccgcagctggaccgacgccagctccatcgtcgattatctgctgttcgcccgccactacatcagccagtgcgaagagcgctacggcgtcgatgaagtggagcgactgctggactcttgccatgcgctgatgaactatggggtcgacaggtacaagcgcccgcagaaaatctccctggtggaagagaaagcgcgccagaaaagccgcgaagagtatctgcaaagccaggtgaatacgttatggaagaccctgccacgcgttgaacgcgaagagtcgccggagcaggcgcgccggtacccaagcgaaccgcaggaaaatatcctctattttatcgaaaagaatgcaccgctgctggaaccctggcagcgtgaggtgttgcgcatcgtgcgcaaggtcagccagtatttctacccgcaaaagcagactcaggtgatgaacgagggttgggccaccttctggcattacaccatcctcaaccatctgtacgatgagggccgagtgaccgagcggtttatgctggagtttttgcacagccacaccaacgtggtgtatcagccgccgtacaacagcccgtactataacggcatcaacccttatgcgctgggcttcgccatgttccaggacatcaagcgcatctgccagtcgccgaccgaagaagaccgctactggttcccggacatcgccggaaaagactggctggagacattgcacttcgccatgcgcgacttcaaggacgagagctttatcagccagttcctgtcacccaaagtgatgcgcgatttccggttgttcaccgtgctggacgacgatcgcaacaactatctggagattgccgcaatccataacgaagccggttaccgggcgatccgccaggagctgtcagcgcaatacaacttgagcaaccatgagccgaacattcagatctggaacgtggatctgcgcggtgaccgctcgctgacattgcgctacatcccgcaggaacgcgcgccactggataagagccgccgcgacgtgttgaagcacctgcatcgcctgtggggcttcgacgtgatcctcgagcagcaaaatgatgacggcagtgtagagttgctcgatcgctgcccgccgcggcctacgccgctgtaaccgcccttgccccgccacaacctataaacatagtcagggagtggcaggggcacattgagcgcctctacgactatagacacaagggaaaattcctaaagcgtgacatccccctttttcactttacaaaattgacatacctttgcattatgccaacgtatttactccaatgcgctcagtgattatttaatgctcagcgagtatccaggtggactaatggaaaatgtagtaaaagaaacagtaaaaaactatagacgtgatattgacggcttacgtgccattgcaataattctggttgttctctatcactcgggagtcggttttctcagtggtggttttatcggtgtcgacgttttctttgttatatcaggcttcttaattggcggaattatctatacagaaacaacacagaataaattctcttattcaaaattctatgtccgtcgaataaaacgaatcgcaccggccttgattgcaatgctgatagtatgctctgcctttgcctttttctatctatctgcattagagctaaaagacttcagccttttttccagtgcgacaatcttatccgttcctaacataatgctttggcataaaacaaactatttttcgccaagtgcagagttaaatccgttattaatgacgtggtcattaggcgttgaagaacagttttatattttcctgccaattattttctccattattgtcaaggcaaatattaaagtagttaagactatttctgtactatcgatagcctcttttattctttgcattatccttacaaaaacatcacctctcttttcgtttttcatgcttccaactcgggcatgggagttgggtgctggcgtaattatttcaataatgcataaagagggacgattcaacagtttgaaagcttcacatagagaatggctttttttggccgggctcgcaatgatattatttgcagcgctaacttttgacaaaaaaacggagttcccaggttattccgccaccttacccgtgctcggttcgatttttttaattctaagcaacggtaagttaagctcaatcattcttggcaaccgtgtgatggtatttattggattagtatcttattcttggtatctgtggcactggcctctgctttcttttgctcgcataggtatcgacgagagactgtcattacatgccggcttactgatatcaaccgttgccttatttattgcttacctctcctatctctttgttgaaactccattcagaaaaagggttcacctatccaatccgaagatcatttttggttacatcttggtttcagcagcattgctcttaccgaccgctctcggttatctcttgaaaggtataccacaaagactcagtccggaggtcgtgcaagtcgacaaggacaagttagagagagttgctgaccgttgtctggtagggtatggagcaaaaacctactctagagatgaaacctgcctcccaaactccagtcaggatgccgttgctctcgtgggtgatagccatgcagcggccttacgaggcggcgttgaaaagtatgcgaaaaataacaatttagtcgtgtatcaaattaataaagcttcatgcccaatgctggttggcgcaacacgaaccattaatacctacccagcacatggtgctgaatgtgatgagtttaataaaaatgcattgaaccttataagtgaaaacaaaaaaataaaaactgttattatctccgctttgtgggactcggccatctatgataatagtggaagctacaaaagtactgtaacgacagaaactggaatatctgctttaagctcaggccttaatgagttagtaaaccaattaaaagccgctcgcaaggaggttataatagtcagtgatgtcccccaacttgacttcgatgtagttaaaaacatcgacaatcaacaaatacccttacgcaaattaataaacagtttactttcaagagaaaaaacagcaggtgaatttaccgatcgctatcaactgccacactcggacgtaaacgacttattgacttctattgcacaagaaaaaggcattagaaaattcaaccctgctgataacttatgcgataataccggctgcaagtttaagtcaaaagatcgtccgttttattatgacaaccagcatttaactacgttaggcagtatatatgctctgcacgggctataacgaagtttaaaaccacccttggcaccggttcttccggtgcccttcatgataatttaataaacctcctaaaaaccactaacatgaatttcactggcctattttaagctaaagatttaacaaactgtaatgaaagaacaaatagttcatctaaaaaccaccacatcatctcctgataataaagacatcctgaaaaattagaaaaaaaactcacagtgtaaaaattacactgtgagttaatatctattaaataattgctatgagagccgcaatcagcgacgcgcttcggtcagatcgctcggcatggtgccctgcatgctctgccaaatcgctccgctgtctttaccgtagctgcgcacggtatccatcacctggtcgtacaatttctcatggcacagcgtggacagcttgctgtagaaggccagcgccagcttgcgcgcttccggattggagaagtagtaacggcccacgcgggtgtacagccctttcagaccgttgaagatcaggccatagatcgggttgccggaagcgaacgccagaccacggaagatctcatagtccaggacattgaaggcatccgcctgatcttccacctcggcggctttcgccagcacttcctgcgcctgctcaggatgattgcgcaccgcagcgcgaataaagatcgacgcgatattggtgcgcacggacagcaggttatcgatcagctgagggacgcttttgtgatcgagacgggccaccgtctcaaggatattgaggccggacgtttcccaaaaattgttcactttggtcggtttaccatgctgaatggtcaaccagccatcgcgggccagacgttgcaacacttcacgtaacgtggtgcgcgtgacgccaatcaactccgaaagctcacgctccgcgggcaaaatagagccaggggggaagcgattattccaaatactctcaataatgtactcttccgcgaaaccggcaggactctgcgcctttatgaccatgtgtttgacgttccgttgcgacgataaaatcagtaaaagtaatcagctcatcataccagatcgtgctgacatgacatagcgtgagcgaaaaacaataaacgaaagtgtgcataacgtggcaaaaaacgcgcaaaaacaccggccctgagaaatttgccgccgtaaaacaagctccggttgcgcccgcccccgccgcgttgttagggtacgtgctacgactgatttaaggatgcataaaggacaatggaaacaaccctgcgcagcgccctgctcaaaaacttcctggggcaatctcccgactggtacaaactgaccattctcattttcctggcgatcaacccgctggtgttctttttcgccagcccgtttctcgcgggttggctgttggtgatcgagttcatctttaccctggcgatggcgttgaaatgttacccgttgctgcctggcggcctgctggcgctcgaggccgtggccatcggcatgaccagcccggcgcaggtctcgcaggaaatcgaacataatctggacgtgttgctgctgctgatctttatggtggccggcatctactttatgaagcaactgctgctgttcgtgttcaccaagctgctgctcaacatccgctcgaaaacgctgctgtcgctggcgttctgcctggccgctgcctttctttccgccttcctcgacgcgctgacggtcgtggcggtggtgatcagcgtggccaccggcttctattccatctatcacaacgtgacgtcgaatcgccccgacggcgacatcggcgatgacagcgattttatcggcgaagagcgcaaacagacgctggagcaattccgcgcctttctgcgcagcctgctgatgcacgccggcgtcggcaccgcgctcggcggggtcatgaccatggtgggcgagccgcaaaacctgatcatcgccaaaaacgcgggctggggttttatcgatttcttcctgcgaatggcgccggtcacgctgccggtgttggtgtgcggtctgctggtttgttggctggtagaacgttttcgcctgtttggctacggcgcgcagctaccggaagcggtacgcgacgtgctgaaagagtatgaccgcaaggccactgcgggccgtagcaaacaagaacggctcaaactggtgatgcaagcgctgatcggcgtttggctggtgctggcgctggccttccacctggctgaagtggggctgattggcctgtcggtcatcgttctcgccacctccctgtgcggcgtgaacgacgagcacgccatcggcaaagcgttccaggaagcgctgccgttcaccgcgctgctgacggtgtttttcaccgtggtcgcggtcatcatcgagcagcacctgttcagcccggtgatccagtttgtgctgcgcgccgagcccgcttctcagctttcgctgttctacctgttcaacggcctgctgtcgtcggtttccgacaacgtgttcgtcggcacggtttacatcaacgaggcgcgcaccgcgctggaaaccggcgctatcgggctgaagcagttcgagctgctggcggtcgccatcaataccggcaccaatctgccctcggtcgctacccctaatgggcaggcggcgtttctgtttctgctgacgtctgcgctggcgccgctggtgcgtttgtcgtatggccgcatggtatggatggccctgccttatacggtggtgctgacggtggttggcctgctgtgcgtccagttcaccttggaaccggcgaccgagctgttgacgcagtggcactggctgacgctgccgtccatcgacgccgtcggccactgagacggcgccggcagggtgaaccgactatttttacgctgaatccggcccaggtggctggcagcgaagaggaattggtttacactgccggttcaattgcttactgcatggaagaatctagatatgttgcaattctttaaccgctgttcacaaggacgcggcgcctggctgctgatggccctgacagcgttggtgttggaactggtcgcgctctatttccagcacgttatgctgctgcagccgtgcgtgatgtgcatttacgagcgttgcgcgctgttcggtatcctcggcgcctcgctggtgggcgccatcgcgccgaaaacgccgctgcgctacgcggcgatcttgctgtggatctacagcgcctgggaaggcgtacagctggcgtggaagcacaccatgatccagttgcatccttcgccattcaatacctgcgatttcttcgtcagcttcccgtcctggctgccgctggacaaatggctgccggcggtgttccacgcttccggtgactgctccgtgcgtcaatggcaattcctgacgttggaaatgccgcaatggttggtcggcatcttcggcgcctatctgctggtggcgctgattgtgctgatcgcgcagtttgttcgcccacgccgccgcgacctgttcggccgctgatcggcagacaaacaaaaaacggcgccggaaggcgccgtttttttaggtattgctgccacattccgagataaagccacctcaggtatgtgtaaggaagtaaacgagcacgatcagcgctccagctacggcaaacaggcggatcattttcattgttatactctcgaacttgcgggagaacggccaaattacccaacttatcgtttaaaaagaagcatcccggcacaattaagcgcgtaatttacataacattaaacttctgcgatatcggcgactaaaaactggccgctctggctcattcctttcagccttcgagcatcaataaattaccgttacttatgaacgactgcacctttgtcacattcagagcacaatattttggtgaagtttacccataaaatccttatagtatcggcaaagtgagtactaccgatttccctggtgttgttgtgtgtcttgcccctcatctttgcaggggcttttttccttctcccccaaccgtcagtccccgctgcctttaaataaatcattcaaatttaactctgcgcggtatcactcatcggccatcgctcgcgcactaatgattaaaatcgttcgtgattctttccttatgctgaaagcagtaggccaatgacatcaaggacacgatttatgccggataccacattgcccccttcgtctcagcgccccttcctgcggcgcatgctgctcaaagccgggaaaaaattcctgcgctggaacggcgaatttcagactcgccattcgctcatctccaccacgccgcggatcggcaatcatgaattccattgggtgacggcgctggaagcccgttggccggccattcgcgaggagttggatcggttactggagcacccggaggacatccccgcgttccatcaaatatcaccggatcagaaacgcatctctaaaggagataactggaaaaccttcgggctgtttgtctacgggcaacgggttgatgaaaactgcgccatctgcccgcgcacagcagaggcggtcagcgagatcccgggcatgcgcaccgccatgttttcaatcctcaaaccgcactatcacatcgtgccccacaagggcccgacgcgagccgtcgtgcgcgcgcatctgggattgatcgtgccaaaggatcgggacaagctctggatccgcgtcgacgatcagatcctgcactgggatgaaggcaaggtgattttgtttgatgattcttatgaacacgaggtccgcaatgataccgacgagctgcgcgcggtgttgtttctcgatatcgaccggccaatggacaaagtgggcacggcggtgaataaactgctgttcagcctgatcaaagccagcccgtatgtgaagcagccgctgaaaaatctggccaactggcatcgccgagataaaaaagcgtgaagcaagagtctcacgcgcgtaagctcaatagccaagagggcggaatgtcttaacacgccgccctctggcattaaaactcgtgttgccgagcaacatctgtcaaggtatccgcgttatctggcccagtccggcttgttgaggatatgatcctgccagtccaccacttcactctcgcgcactgcgatatgccgcaccgtgatgcgctcgccgtgcatcgccgctttggagccgctgatcagcgggtgccaggggaacagcggctttccttcgccaatcagacgataggcgcaggtcggcggcagccaatcgaaggtggtgagattttcgcgcgtcagtttgatgcagtcttcttccagctcgaagcgccgctcgtagttgcggcattggcaggatttgatgttgagctggttgcaggctacgttggtaaaataaatctcgtcggtatcttcgtcgatcagcttattcaaacagcattgcccgcacccgtcgcacagcgattcccactcttgttctgacatttccgccagcgttttctgttgccaaaaagcgagttgtgacatgttagcgtccggtttcggtaaatggataagtcacctgcgagcaggttcgaggggggactatatagacattttagccacaagatgcaagctttgccgccgacgatgccggcggcaaggagaaatcagatcacccgggtgctgagcgttttgccgttcaggctgattttcagcatgtcgccggaagccatcgggcccacgccctgcggcgtgccggtcaggatgatgtcaccggcgcgcagcgtgaagaagcggctcatgtagctgataagcggcaggattggcgtgatcatgtcgcgcgtattgccctgctggcgcaattgatcgttgacggtcaacgacagctcggcgttttgcggatcgccgaattccgccaccgggataaatcccgacatcgggcaggaaccgtcgaaggccttggccttttcccacggctggccggcctttttaaagcccgcttgcagatcgcgcagcgtcagatcgagcgccacaccgtaaccggcgatcgcccgcgcaacgcgatcttcgttggcctgtttcaacggtgtgccgatcaataccgccagctccacctcatgatgcaccgcaccgaactctttggggatggccaccggctggcgaatatcacacaacgccgtttccggtttgataaacaccaccggctcgacggaaaccgcgctgcccatttccttgatgtgatcggcatagttgctgccgacgcagactaccttgttcaccgggaaatcgagcaacgaaccctgccagtctctatgttgatacataccgcttctcccaaactgtagaggcttggcgcgccaagccgattattggtgtgccggatcaatgcccgatcgcgtctgccatcatacccacggcgagagcgaaatagtaagagcgattccagtgcatgagggtgcggaaattatcatagaccaggaacgtccgcccctgcagatcatccggcgcgataatccaaccgcgctgcacggcatgcggcaacgcactgccatccgcgcggcgcacgccgcgtttctgccagtcgttgacgctgcgcgcctgcgcgtctttcaggcccagttcggccgggttgaaaccggcgggcaatttgacctcgcgcccccaaccgatgccgggctgccaaccctctttggacaaatagctggctgtagacgcgaaaacgtcgtcaatgttattccagatatcgatgcgcccgtcgccgtcgccatccgcagcgtagcgcaagaaggagctcggcataaactggcattgccccatcgcgccggcccaggagcctttcagcggcgtatcgccgacgtgcccctgctcaactatctgcagcgccgccatcagttcctggctgaaaaaagcttcacggcgcccttcaaacgccaaggtcgccagcgcagacaccacgtcttcccgcccctgaatcttgccgtaggcgctctccatcccccacagcgcgatgatataacgccctggcacccgatagcgctcgctggcccgcaaccattgcgcatggcgcagccgatacagttcgcgcccctggcgcaccttggcgggcgacatcacccgccgtagatagtcgtccagggttaccttctgctccggctgattgcgatcggccttgatcacccgatcgacgaaatggatttgcgcaaacgcgcgatcaagggtggcctgactgatgccctgttcccgcgcccggcgcttaagttgatcgacatacgccgggaactgcgccggatcgcggccgctcgccgccagcgtcgtctcctgcgccgcctgcgatgcgccgggcatcagcaccccgcccagcgccaaccaggcggccaatacggtctttctcgccgaacgtgtcatcgcgcctcccctggccgtggcgactgtctcaggccttatcgcccgccagatgctgattgagcaggttttcaaccggcggcgggaactgcagataatagccttcgtctttcaacgcctgcttcaccttttcgatatccgccgaggccaattttttgcgctcatcgagcgacagcatcatggcgaattgcggcacgccgaaacttttcatcagctcttccggcacacgagagaaatcgtcttttttttcgacataaagataagtttgatcgcgtttcgggcttctatagatcacacaaagcatttttttaactctatttaattgagggagcgtcttgcctggatataactctgactataacatgcttatagtacatcggaatatcgcaccccgagtggtattccggggatttaaagttgctgagactgagtcaggatagatgtcacaatcgccaattgagctaaaaggcagcagttttaccctatcggttgttcatttgcataattcgcagcccgaggtaatacgccaggcgttacaggaaaaagttgagcaagcgcccgcttttctgaaaaacgcccctgttgttatcaacgtcgcaacgctggaaggcgatgcgaactggaaagaacttcaacaggctgtcgcggcagcaggtctgcgcgttgtgggtatcagcggttgcagagatgagcgtcaaaagcgcgcgatagcccgcgccgggctgccgctgctgagcgaaggcaaaggccagaaaatggcggcgccggagcctgcaccagcgcccgtggtggcggataacgcccccgccaaaacgcgcatcatcagtacgcctgtccgctccggccaacagatttacgcccgcaacagcgatctaatcgtgaccagcagcgtcagcgccggcgccgagttgattgccgacggcaatattcatgtctacggcatgatgcgcggtcgcgcactggcaggcgcgtcaggcgacacgcaatgtcagattttttgcacccacctggcggctgagctagtctctatcgcagggcagtactggttgagcgaccaaatcccgtccgattacgtcgggcaggccgtacgactcagcctgttggataacgctttaaccatacaacctttaaattaagcccttttgacaaggaatccatttcatggcacgcattattgttgttacatcgggtaaagggggcgttggcaagaccacttcgagcgcggccatcgctaccggcctggcccagaaaggcaagaaaaccgtcgtgatcgatttcgatatcggtctgcgtaatcttgacctgatcatgggctgcgaacgtcgggtagtttatgatttcgtgaacgtgattcagggcgatgccacgctgaatcaggcgttgatcaaagacaaacgcactgaaaacctctatatcctgccggcttcgcagacgcgcgacaaagacgcgttaacccgtgaaggcgttgaaaaagtcctcaacgatctcggcgagatggattttgacttcgtggtctgcgactcaccggccggtatcgaaaccggtgcgctgatggcgctgtatttcgccgacgaagctatcatcaccaccaacccggaagtctcttcggtacgcgactccgaccgtatcctgggcattctctcttctaaatcacgccgcgctgagaaaggcgaatcgcctatcaaggaacacctgctgctgacccgttataacccgggccgcgtcagccgtggcgacatgctgagcatggaagacgtgctggaaatcctgcgcattccgctggtgggcgtaatcccggaagaccagtccgtgctgcgcgcttccaaccagggtgagcctgtcattctggatgccgagtcagacgccggtaaggcgtatgacgataccgtttgccgcttgttgggggaagaacgcccattccgcttcattgaagaagagaagaagggtttcctgaaacgcctttttgggggataaaccatggccttattagacttctttctgtcccgcaaaaaacagacagccaatatagccaaggaacggctgcagattatcgtcgcagagcgtcgtcgcggggacagtgagcccccgtatctgcctgatttgaaacgcgatattctggcggttatttgcaaatacattcagatcgatcctgaaatgctgcatgtgcagttcgagcagaaaggggacgatatttcggtacttgaacttaacgtgacattaccggaatcggaagaagcagctaaatgattgcgacgcattaattaccccctgtatattttatgcagggggtaactgtatgttcatccagttattaagcattatcggcagcaaaaaatcgatttttccctttgggacaattcccaattaactttgccgccacctcgtttaaagtaaattctggccagatttaccttcaacgcattatttcctgcctatattcacccgagcagagtttccctaccctgccctggtgataaccagcgattaataatctttcaggatgtcctgcaacggcaccattaataaatcgccgcgccagccgctgattaattcagggcgactctcgccgtccttcagtttccaatgccagttcaacaattggttaatttggcgacgggatgccagcagctcgctgctcaacccgctttgctcgctgacggtagcgatcgccgccttgatgtctttgaacaccttcttgtagcccggctgatcgataaggttggccaacggcgccggcaactcggactcgtccagcgcttcggcctccgccaccagcgccagcagcgttttaccgtgataacggatctccggcccgctcagacccagcgaatccagttctcccagcgaagacggcatatagcgcgccacctgccacaggttctcctcacgcaccacaaagttcaccgccagatcgcgctcacgcgcctggcgcagccgccattccgccaacttctgcagacaaccgagctgacgcgggcgcagctgccaggcgttgctgatttcgcgataggccaatgccggcgccagcgtctcgctacggcgctggcacagcagcaggcactcgttattggccgccgcggtccaaccggcctcttcggtctcctgcaccaactgtttagccatcggcagcagatagaacacgtcggcggccgcgtacacgcattgcctttcggtcagcgggcgcgccagccagtcggtgcgcgactcgctcttgtccagctcaaccttcatatactccgccaccagcgtcgcgaagccacaggagagcggccggccggtaaaggcagccaggatctgagtgtcgaccatcggcgtcggcagcgttttaaaggcgttgagaaacacttcgagatcttcactgccggcatgcaggaacttcaccacggcggtgtcggccagcaggtcgacaaacggctgccattgcttgatcggcagaggatcgataagggagagttgttcaccgtcgtagagctggatcaggcccagctgcggatagtaggtgcgcgttctgacaaactcggtgtccagcgcaatctgggcatgctttctcgcctgctcgcagacctgctgcaatccggcatcggtagtgatcaactgataattcaaaacatcattctcttgtaggattcaaacacaacaacgccggcattcaccggcgttgttgatagtcaggcgcgagagcgacacctaggcggcatcggccggcttcggcgtttttagctcatcgcgcagttctcgccgcaaaatcttgccgacgttagacttcggcagttcatcgcggaactcaacaattttaggcactttatacccggtcaggtgccgacggcaatgggtcaacagctcttccttggtcagcgaggcgtctttcttcaccacgcagatcttcaccgtttcgccggagacctcgctcggcacaccgatcgccgcacattccagcactttcggatgctggctgaccacgtcctcgatctcgttcgggtaaacgttgaaaccggagaccaggatcatgtctttcttgcggtcgacgatgcgcacgaacccctgctcgtctacggtcaccacatcgccggtcgccaaccagccatctttcagcacttcgtcggtggcgtccggacgctgccaatagcctaacataacttgcggccctttgacccacagttcgcccggttcgcccggcggtacatcctggccattgtcgtccaccagacgaatgtccgtcgacggcaccggcaggccgatgctgccgctgtagtgtttcagatcgtaagggttaccggccaccaacggcgcgcactccgtcaggccataaccttccagcaggtgtttaccggtggttttctcccacttctcggccaccgctttttgcaccgacatgccgccgccgaccgagaaacgcagcgtagagaaatcgagcttgtggaactcttcgttgttcagcaacgcgttgaacagcgtattcaccccgctcatggcggtgaacggatatttgcccagttctttcaccagccccggaatgtcgcgtgggttggtgatcagcaaattgcgcccgcccagatcgataaacagcaggcagttcaccgtcagcgcgaaaatgtgatacagcggcaacgccgtcaccaccagttcctgcccttcgcggaacagcggcgaataggcggccttggcctgctcgaggttggcctgcatgttgcggtgcgtcagcatcgcgcccttcgccaccccggtggtgccgcccgtatattgcaggaaggccagatcggcattaatgatgtccggttttacatactgcaggcggcggccgcgctgcagcgcgctgcggaaggaaatggcgtccggcaggttgtatttgggcaccaggcgcttgacgtacttgaccacgaaattgaccagcgtacctttggcggccgacagctgatcgcccatgcgcgtcaggatcacgtgtttgacctgagtgttgaacaccactttttccagcgtatgggcaaagttggaaacgatgacgatggcgctggcgccgctgtcgttcaactggtgctccagctcacgcggggtatacagcgggttgacgttgaccaccaccatgccggcgcgcagaatgccgaacagggcgatggggtattgcaacaggttaggcatcatcagtgcgacgcggtcgcccttcttcaggcccagttcattttgcaggtaagccgcgaaagcccggctgcgttcttccagtttgcggaaggtcatcacctcgcccatattgataaaggcgggctgatcggcatagcgctgcacggcatgctcaaacatttcgatcaacgacgaatagcgatcggcatcaatctctgcgggcacatctgccggataccgttttaaccagaccttatccaaggtattactcctgaaatcattactaattatcatcgcagccctcaaactcgcagcctaaccataacaatattttaactcagcagaccagttcgggttttaaacattattcaggttgcgatgtacgtcactaattgtcggatattccttatcccaaaaaacaaaagggcggcctgagccgccctgtcaaatatgttcacatcaagcgtatgctactcggttacgatggtttgcacctgtgccgggccagggttgtaccagccatagcctgcgccccaaccgggtccccacggacctccgcgccagccccaagggcccatcggcgccggcggcatcaccacctgctgtaccagatgccagcgcttgaaacctgtcacgttcatcgttacgaagcgatatggcgtcatgccgatccgtccctctttcaggccggtgatagggccgacgacggtcaccagctggcctttgaaatcgaccggttcgaggaagccgctcaccgtggccagcaagcggccgttcgacggttcacccagtatcggccgtgcaccgctgtcgagcggcaccgccgcgatctccagcagcgtgcgcccttgttcgttggcgacgttcaccacggtgccgccgaagcgggcttccgcgccggtaaacaggttcggtgcattttgtaccgaggaaagctgagtcaccggcgaagggctggagcctttgatcgcatccggtacggtgacgcacccggtcagaaccagcgcgccgcaggcgacggccagcagcgacagctttttacttgcagtgcggattaacatggtcgcaatctcctgaaatgcctgtaactttgaccgcgtttcagcgttcaagttgcaggccttcatcgcccggcatcaacatcagcacaataacgccgcgattactcgcggcccggcagttttttccaggtcacttcattgcgcagataggtcggctcggcgttttccaccgctaccgccagcccttcttgccaggcctgcagcgccagcggcagcatgtcttgcgcctgcggcaacagcatctggccatcgcgcacgctcagcgtggaaccgttgaccagatcggggtaggtttgccagccggtgccgacgtgggcccattcgccctgcaggcgctgcgcacgctccagcgcctgcgccggcgacagcacggcctcgccttcgttttccaaccagcggccgtccgcctggcgttcgaactgcccccagtaaacttcacccatgcgcgcatcgatcgccgccagcacacgctccgcgccgctgacgcgccaggcgccctgcgccatggtttgcagcgtggaaacgccgatcatcggcagatcggcgcccagcgccaggccttgagcgatgccgatgccgatgcgcaccccggtaaaactgccggggccgcggccgaaggccagcgcatcgagctggttgagcgccaggccggattccgccagcacctgctgcaccataggtaaaatacgttgcgtatgctcgcgtgggcacagctcaaacagggcgtggatttcgccttgattccagacggcgacggaacaggcttccgtcgcggtatcgatcgctaaaattcgcgtggacatgccaacctctggcgggaataaaactgggtttttcatacagggcgcgcattgtagcacagccccgtaagcccttcatctttcacgtggccgacgtgtcggcggcctgcaggaaggcgattgcctgcttcagatcgcgggtgcgcggcgtgggcggcaggctattgaggaacacctcgccgtaagggcgcatcaccagacggttatcgcagatcaccagcacgccgcgatcgtcggtgtcgcggatcaaacggccgacgccctgtttcagggtgatgaccgcatccggcaactgcacatcattgaacggatcgccgccacgcaggcggcaatcttcaatacgcgccttcagcagcggatcgtccggtgacgtgaacggcagtttatcgatgatgacgcaggacagcgcatcgccgcgcacgtccaccccttcccagaagctgctggtcgccaccagcagcgcgttaccggcggcgacaaactgcgccaacagctggcctttactggtttcaccctgcaacagcaccggcagcgtcatcgtggcgcgaaactcttccgccagctcacgcatcatctggtgcgaggtgcacaagaagaagcagcggccgttgttggcttcgattaatggccgcagcatgcgcgccagctggcgcgccccgccaggctgattcggcgaaggcaaaaagcgcggcacgcacagcaacgcctgtttggcatagtcgaacgggctcggcagcagcagcgttttggccttggtcagtcccaagcgttcggtgaagtggcccagctgatcgttgaccgacagcgtggccgaggtaaagatccagctgcccggcttctcgtccagcatttcgcggaaccggtcggccaccgtcaacggcgtcagcgccaacacgaagtggcgcgaattgcactcataccaatagctgtaacccggctccgtcaccgccttgaggcgtttgagacgcgcgcggtacagcgtggcgcgctcaaaggcggcgtccagcagcgccgaacgccccagagacagcttcatcacgtcgtaacacagctccagcgcgtcatcgagcagcaataaagcgcgctgcacgttcggttccccgagcacatcgcgcagattgccgcgaaaacccggctctcccagattaaggcgaaaatcttgcgtgctcaggctgagacggtcggcgcttttttgcagttgggcggcatcgcgcacctcggtgcggtaggcgatggtgatgtccttcgccagatccaacaattggcggctggtgagctgctggccgaaatactggctggcgatgtcggggatttggtgcgcctcatcaaaaatcatcacctcggcttccgggatcagctcggcgaaaccgccctctttcaccaccatatccgccaggaacaggtgatggttcaccaccaccacatccgcatccatcgcgcggcggcgcgctttgaccacgaagcaatcctgatacagcgggcagtcgctgccgagacagttatcattggtgctggtcaccaatggccagacgaaactgtcctccgccacttcgctgcaggtgctgatgtcgccttctttggtctgcgacgaccacttgcgcagctgcaccaaatcgatcagcgtctgccccgccagctccccgccggccatcgactgttgctccagccgctccagacacaggtagttggagcgtcccttcagcagcgccagcttgcctttgtacttcagcgccttggcgacggtgggcagatcgcgcgcatacagctgatcctgcaacgctttcgaaccggtggagatgatcactttgcgatcggcgcgcagcgccggcgccagataagcgaaggttttgccggtgccggtgccggcttccaccaccagctcctgcttgaaattgatcgcctcggtgacggcctgcgccatctgccgctgcggctcacgcggtttgaatcccttgatagcctgcgccaatgcgccgtctgttgcaaaatcgtctgtcacgctgtctctctgccggtgtcattcagcggtgattatgccaagcctgccgcccggctaccacccactttatcgccgcgctttttcatcaccggctgtgctacccttagcgggactatgatatggagataagcaaatgaatatcgaaagaattgatcccgatcagcgctggtccgaagccgtggtgcacaacgagaccgtttactataccagcgtgccggagaacctggatgatgacgcgaccgcgcagaccgccaacgcccttgcagccatcgacgtgctgctggcgcgcgtaggctcggataaaagccgcattttggacgccaccatcttcctggccaataccgccgacttcgccgcgatgaacgccgcctgggacgcctgggtcgttgccggcagcgcgccggtacgttgcaccgtgcaggcgcagctgatgaatccgaaatataaagtggaaatcaaaatcatcgccgcgctgtaagcctgagcgcagacgaaaaaaaaccgcagacggcaacgcctgcggttttttattgcccgctatcaggacagtttaaggatcaccatccccgccagcaacagcgccaggccgatccagcctttggcgtttaaccgctggccgaacatgatccagcccgcagcgatagtggcggcgataccgaaaccgccccacaacgcataagcgatcgacagatcgatgcccttcaccgcttgcgccagggcgctgaacgcaccgagtaccgacagcagcgacagcaatcccagccaaattttacggaaaccgtccgacatcttcaggaagatattggcgatgatttccagcacgatggccaatcccaggaacccaatgtggtacaactcaaactgttgcatggttgtcacctcgcgggctgacctgttttcgctctttgcgggtaccggatttcaccagcatgataccggcgatcagcgtagccagacccagtaccttcagcgcggaaatgggctcgtcgaaccacagcacgctgaacagggtaatgaacagaatgccgataccttcccacagcgcataggccacgcccaacgccacgcgttttaccgctactgacagcaacacataagacgcggtgatcatcacgtacatcacgatatgcccgatcatgccgccattgacgctggcgtatttcatcgacaaggtgccgatgatttcggtcatgatggccaaacctaaaaagatccaataaatcataatttttctcccaaacggcgaataacgcgcgccaaggcatatttatcccgatttatctcgtcgaacggccgcagtacggcgcgcaagacgcagagatccctggggataaactgacccaaacgcaaaaagaatgtttgcccggctgaacggtagagcgaaggcgtaagcccgctacccgcaccggttaagggagaaagacgctatagctcgctgcaccagtgatgctcactggcaaggatcgcagacaggaagagttggcacgtagaggttctgagggtagttccgttaatagtcatcataatagttctctattatcagccgcacaccgtgcgatttgcccaatatcctcataaaagtaaaattttcaactgagatatttttaccacagccaaaataagaaagcaaactgccgttttcatcaaaaagcagaaaaaaacgggttaaaaataagaaagttaatcgagataaaaattaaaaaaggctcaacggagcgttgagccttgcgatacccgcgggtgagcaaataagcgccaaccccaggcctggcgcgggttacaacgcggcgccgctgacggcgctgcgcgccagttcagtgatgcgcgcatagtcgcctttttcgagcgcgtccgccggcaccagccaggaaccgccgatgcaaagcacgcttttcagcgccagataatcgcggtaattgtttggcgtaatgccgccggtcgggcaaaaacgcacctgcgggaacgggccgccgatcgcctgcagcgccttcacgccgccgttggcttccgccgggaagaatttgaattcccgcagaccgtgatccatgccctgcatcagttcagacacggtgctgatgcccgggatcagcgggatgggtcccgccgtcgccgcctgcagcaaggcctcggtcagccctgggctgatggcgaactgcgccccggcttcggtcacctgccgcagctgctgcgggttgatcaccgtaccggcgccgatgatcgcctccggcacctcttcggcgatagcgcggatagactccagcccgcaggcggtgcgcagcgtcacctccaatacccgcacgccgccggcaaccaacgctttcgccaacggcaccgcctgctccagcttgttgatcacgataacaggcaccaccggccccgccgtcaggatctgctcggcgctggttttccagtttttcatcgttatttctccattactcgcggttaacaatggcacgcccctgccacagggctccgcacaaatgcgcggacgtccggccgtaccgtaagtgatgaggcccacgcgcagatcgcaggcaaaaaaaagccggcagacaggctgccggcattacgcattattcgaactcgttccaggagcggccgtcgcgggtgatcatcgccaccgaggccaccggtccccaggtgcccgcctggtaaggcttaggcgcctcgttgtcggctttccatgcgtccatgatggagtcgacccacttccaggcttcttccacttcatcgcggcgcacgaacagcgcctgaatgccgcgcatggtctccagcagcaggcgctcgtaggcgtccgccacgtgctcctggttaaaggtttccgagaagctcaggtccagcttggttgtctgcagacggtgcttgtgatccagccccggcaccttgttcagcacctgaatttcgatgccttcgtccggctgcaggcggatggtcagcttgttctgcggcaactgctggtaagaatcgctgaacaggttaagcggcgggtttttgaagtacaccaccacttccgaacatttggtcggcagacgtttaccggtacgcaggtagaacggcacgccggcccactgccagttgtcgatatccacgcggatagagacgaaggtttcggtgctgctgctcttgttcgccccttcctcttccagataacccggcactttcttgccctggacgaagccggcggtgtactgaccacgcacggtggtttcccggacattggtctgatcgatgcggcgcagcgagcgcagcaccttcaccttctcgtcgcggatgcggtcggtggtcagatccgccggcggcgacatggcgatcatggtcaggatctgcagcaggtggttctggatcatgtcgcgcatctggccggcctggtcgaagtaaccccaacgcccttcgatgcccacctcttccgctacggtgatctgcaccgaatcgatggtgcggttatcccagttggaggcgaaaagcgagttggcgaaacgcagcgccaacaggttcagcactgtctctttgccgagatagtggtcgatacggtaaacctgggattcgttgaagtactccgccacctgatcgttgatcacgcgtgaggacgccaaatcggtgcccagcggtttctccatcaccacgcgcgccggctcatggttcagcttggcttcgcccagccctttgcagatggcgccaaaggtgcttggcggcatggcaaagtagttgatggtggtgcggtgcttctgatccagcattttacccaatttggtaaagttcttgctgtcgttgacgtccaggttgcagaagtccaggcgcgcgcttagcgtggcccagagttcgtcatccagtttttccttcatgaaggtgccaagcgcttccttgaccacttcggtataggcttgtttatcccactccgcgcggccgacgccgatgatccgcgtatccgggtggatgtgtccggctttctctaactggtacagggaaggcagcagcttacggcgcgccaaatcacctttcgcgccgaaaataaccaggtcacacgcctgggctgtagaggttaccgccatgttcatctcctcgttgcaggatatttgtaattttcttacattactaatgtactctgtttgactacggccagcaaacccggagcaaagcagaaaaaaaggcctcaagattccagtggaaagcgccaatgtacgccaacgccctcaccacgggcaaaactgtaatttttcgtcttttttgacgctctgttaccattatgaaagttagacacaggtcatattctggtgaaaaaaccctgcatacgccgtgtcgagactgccaacggttaccagcacgtagtatattttcactaaaccggcattgatttctcctttgtttgaaatcgacataccctatcgattccaggttacagccgctcgtttggcgtctgctcgcacggcgaacacgggcgaaattcgacgctgttgcttgaaagccacagggataaaaccatgagtgactctcgttatatgaatacgctggacaaaatccagagccatctggaacgcctgagcaaatctgaaaggaaagtcgccgaggtgatcctggcctccccgcagaccgccattcactccagcatcgccacgctggcgcgcatggccgacgtcagcgaacctaccgtcaaccgtttttgccgccgccttgataccaaaggctttcccgatttcaaactgcatctcgcccaaagcctggctaacggcacgccctacgtaaaccgtaacgttgaggaagatgacagcgtcgattcctataccagcaagatcttcgaatcggtaatggccagcctggatacagtaaaggcaaatttggatattgccgcaatcaatcgtgcggttgacctgctcacccaggcaaaaaagatctctttcttcgggctgggcgcctccgcggcggtggcgcacgatgcgatgaacaaatttttccgcttcaacattccggtggtctactttgatgacatcgtcatgcagcgcatgagctgcatgaactccagcgaaggcgacgtggtggtgctgatctcacacaccggccgcaccaagaatctggtggagatggcccacctggcgcgggagaacgacgccacggtactggctatcacctcgcgcgacaccccgctcgcccaggcggcgaccctggccctgctgctcgacgtgcccgaagacaccgacgtttacatgccgatggtgtcgcggatcgcgcaattaacgctcattgacgtgctcgccaccggatttaccttgcgccgaggggctaaattcagagataacttgaagcgggtcaaagaagcgctcaaagaatcgcgctttgataaaggcgtggtcattcccaacagttttgattcgtgacccgacgaagaaaaaatcgccgttcaacagacatttgaatgacggcatcagaggcggtaccctgttaacatgctcatacgggtaacccgggtgaaatatcagtgttgtaaaattacatttcacgcctggtttcgttatccgacgttatcgcaacaccaatatttgcttcaccagtcaacggagtaatacatgtccagacggctcagaagaaccaaaatcgttaccaccctgggtccggctacagaccgcgacaataatctggaaaagatcattgccgccggcgccaacgtagttcggcttaacttctcccacggcagcccggaagatcatcaggctcgcgctgacaaagtgcgcgaaatcgctgccaagctggggcgtcacgtcgctatcctcggcgatctgcaagggccgaaaattcgcgtctccaccttcaaggaaggcaaaatcttcctcaacgtgggcgataaattcctgctggacgccaacctgtcaaaaggcgaaggcgataaagaaaaagttggtatcgactataaaggcctgccagccgatgtggtaccgggcgacgtcctgctgcttgatgacggccgcgttcagctgaaagtgctcgaagttcagggcatgaaagtgtttaccgaagtgaccgtcggcggcccgctgtccaacaacaagggcatcaacaaactcggcggcggcctgtcggccgaagccctgaccgaaaaagacaaggcggacatcgtgaccgccgccaagattggcgtcgactacctggcggtctccttcccgcgtaccggtgaagatctgaactatgcccgccgcctggcgcgcgatgccggctgcaacgccaagatcgtgtccaaggttgagcgcgccgaagcggtttgcaccgacgaagcgatggacgacattattctggcctccgacgtggtgatggtggcccgtggcgacctgggcgtcgaaatcggcgatccggaactggtcggcattcagaagaaactgatccgccgcgcccgcaccctgaaccgcgcggtgatcaccgcgacccagatgatggagtcgatgatcaccaacccgatgccgacccgcgccgaagtcatggacgtagccaacgcagtgctggacggcaccgacgccgtcatgctgtcggcggaaaccgccgctggccaatacccggcggaaaccgtggcggcgatggcgcgcgtttgtctgggtgccgagaagatcccgagcatcaacgtttccaaacaccgcctggacgtacagttcgacaacatcgaagaggcgatcgccatgtcttcgatgtacgccgccaaccacctgaaaggcgtcaccgcgctgatcgccatgaccgaatccggccgcactgcgctgatgatgtcgcgcatcagctccggcctgccgatcttcgccatgtcgcggcatgagcacacgctgaacctgaccgcgctgtatcgcggcgtgacgccggtgtatttcgacagccacaaagacggcgtgatcgccgccaatgaagccgtcaatcgcctgcgcgacaaaggcttcctggtctccggcgatctggtgatcgtcacccagggcgacgtgatggaaaccgtcggcaccaccaataccagccgtatcctgcgcgtcgagtaatccacgccgcagacgacatgccggccggctcacgttggccggcattttttttgccctgacaccgccataaacgacggagaacgccatgctccaccaacgcaatccagcctcgaccggtgatgcgctcgatctcgatgggcgcggtctgacgcagctcgacgaatcgcagctaaccggccacgcgctgcgcaaaatcagcctgtacgacaatctgctgacggccttccccgcctccatcttgcaacaccgcaacctgcaggtgctgaacatctcctgcaatcagctcgaccgcctgccgccggagattggtcagttgcaacagcttgagatgttcgacttcggtcacaaccgcgcaagcgaactgcctgaaacattggggcaactgcaccggctgaaatacctctacctgagcgataacggctttagcgacctgccgcgtgcgctggcgcaactgcagcagttggtttacctcaacgcgaccgataaccaactgaccgccttgccgcaggcaataccgagtctggcggcattgcaggagctgcgtttatacaacaatcgcatcggcaacctgcccggcgaaatcgggcagctgcgcgcgctgcgcgagttgcatatcatgaaaaatgccctgaccgcgctgccggcggaaatggctctgctcggcgagcttgagatactcgatgcggccaacaatgccatcaccgaactgccggcatccttctgccgcctgccgcgattgagcgagctgaacctgcgttttaatcagctgacgcgcctgccggaaaatatcggtgagctcacggcgctgagaagcctggatctgcgcgccaaccgcctgagcaatctgccggaaagcctcggtgaactgagccggctgcgcaagcttgatctgcgctggaatgatttcacccacacgcctaaaatcgtcgacatcctgcgggctcgcggctgtagggtgcacatctgaagagacgccggccgggttgtggccctgccggcgttagcggtagaaaggattaacgatacagatcgtcgcgcgagtaaggctcaatctccccttctttgcgcgtcttcaacagtttgaggatccaggtgtactgctccgggttcgggcccaccaggttttccacttcttcattcatacggcgggcaatgcgcggatcgtccgcttcggccagatcgtccatcggctcgcgaatatagatatccagcatgctggttttgccgtcgtacaccgggaacaacggcacgatcgccgcacggcataccttcatcaaccgcccgaccgccggcaaagtcgccttataggtggcaaagaagtcgacaaactcactgtgctcagcgccgtggtcctgatcgggcagataataaccccaatacccctggcgaaccgaactgataaacggtttgatgccgtcattgcgcgcgtgcatgcggccgccgaatttacgacgcacggcgttccacaggtagtcgatcagctgattgcgctggttgtggaacatcgccgccatcggttggccgcgcgcggccatcaacatcgccggcacatccaccgcccagccgtgaggcaccaggaaaatcacgttgcgcccttccgcccggatcttgtccaacacctcttcaccgtgccaacgcacgcgcttgagcactttctcgggcttggtgcaggccagctcagccatcagcaccatcgactgcggcgcgcaggcgaacatctggtcgataatgtgctcgcgttcgctttcaggcaactcaggcaagcaatacagcaggttgatgcgggcacgacggcgcgcgcccttcgccaacttgccagccagtttgccgaccgcacccagcaccggatcgcgcaggcgcgcaggcaccagcgaaatgccggccatcagaccggttcccaaccacacgccccagtagcgcggatataaaaaggctttttgaaactgcggaatgaactctacgttcgatttcttctcgttttgcatgcacatgctcttggcttagcgattcggctaatcataattgccagcaccgattttgcaattaacaaccgcgaaccgcccaggtaaaacagcatcggcccgcaatcaggccgatgaaattaacggcgccgaagcgccggaaaaagggggcgttaatccaactgcagctgaggaaccacttccttcacctgcgccagataatcgctgcggtctttgccgcccagcccttcggaacgcggcagtttggccgtcagcgggttcaccgcctgttggccggtccacagttcaaagtgcagatgcggcccggtggagcggccggtgttgccggagagcgcaatacgatcgccgcgtttcaccttttggcctggtttcaccagcagttttttcaggtgcatatagcgcgtggtgtactgacgaccgtggcggatcgccacatagttgcccgctgcgccgctgcgtttggcgatcaccacctcaccgtcaccgaccgccagcaccggcgtgccgaccggcatggcgaaatcgacgcccttgtgcggcgccacgcggccggtcaccgggttcacgcggcgcgggttaaagttggaggagatgcggaactgtttcatggtcgggaaacgcatgaagccgcgcgccaggccagagccctggcgatcgtagaatttgccgtcttcggcgcggatcgcatagtaatccttgccgccggtgcgcaaacgcacgcccaacagctggctttgcgatttcttgccgtcgaaatgctcacgcgacatcagcacggagaactgatcgcctttgcgcagcttgcggaaatcgagctgccactgcaacgccttgatcaccgagttgatttcgttacggctcagcccggcgtcgccggcgctgctgacgaagctgccgttgacccggccgctgatcacgttgttgcgccattcgccctgctgcgcctcttttgactccttgaagctgttgccgacgcgatcataggtgcgagtttcgcggcgggaaacctcccaggtcaactgctgcaaatcgcctgcgtcgttcacggtccacgacagttgctggccgatcttcaggttacgcagatcgcggttttgcgaagccagcaaggtgacatccgacatatcaatgccgtactgcgtcagaatgctgccaagggtgtcgccggtggaaaccacatattcatgcacgccatcatcgccggcatccttctggtccagctcatcctgcgggatttcgtcatcgggggtgggttggtcgacatctatcggttcactggcttcagggagcaatgaccgcatctggctggattctaactcgacgctcttggcgatggggttgtgttctggggggtaaacaaaaggccgccaaacagcgacggccaatgtgacgactgtcagcgaccccagcatgacgcggtggggccgtggcaggttgttatacgccagagcgatagttcggactatctgctgcactcgatattatcctcataagctttacttcaggcagctcacgtactggtttgacagctgagtcaggaatttcccgtagctgtccttctccagcgcgatgccggtgcccagcgggtccagcgttccggaacgcactttggtacccttggcgacggcattgattacggccggcctgaattgtggctcagcaaaaacgcataccgctttctgctcaaccaactgtgttcgaatttggtgtaggcgctgtgctccaggctgaatttcgggattgacggtgaaatggcccagcggactcaaaccgtagtgtttttcaaagtagccgtaagcatcatgaaaaacaaaataacccttaccttgcacaggcgtaagcatgttaccaacatttttgtcagtttgcgtcagcagattctcgaactggcgcaggtttgcgtctaatttgtccttattttgcggcataagttccaacaatctgtcgtgaatcgcgatcgcggtcacttttgctatctccggcgacagccaaacgtgcatattgtactcgccgtgatgatgcccatgatcgtcatcggcatggttatgcgcttcgcctgcatgttcatgatcgtcgtcctcttcgcctttcatcagcagcggcttcaccgccggcagttcgctgatagccagctttcgcgtcgccgagatcggcaccagcgccttggtcaggaacgcttccatgtccggcccgacccacaacaccaggtcagcggaacgcaggcgctggatatcggaagggcgcaacgcaaaatcgtgtggcgaagcgccgtccggcagcaacacctcggtcggcgtcacgccgtcggcgatggccgcagcgataaagcctaaggggcgaatcgaggtcaccaccgcagcggaagcgctgctcagcgggccggccatcaacagtgcgctagccagcagcgtgcgctgcagccatttatttttctttgccatcatcagtaatcccatcgttttcatcaacaaggcgtgatattataacatccgcttcgttctgcaacctgtaatctcgagatgtctacactgataacgctaaaaaatatctccgtcgccttcggcagccgcaaggtgctgtcgaacatttccctcagcctgcagcccggccgtattctcacgctgcttggcccgaacggcgcgggcaaatccacactggtacgcgtggtgctgggattggtcaaaccaaccgccggcacgctggagcgggagcccgacctgcgcatcggctacgtgccgcaaaaactccacctcgacgccaccctgccgctgaccgttagccgctttatgcgtctcaagcccggcgtaaagaaagccgacattctgccggcgctcaagcgcgtgcacgccgcccacctgctcgaccagccgatgcaaaagctctccggcggcgagaaccaacgcgtactgctggcgcgagcgctgctgaataaaccgcagctgctggtgctggacgaacccacgcaaggggtggacgtcaacggtcaactggcgctgtacgatttgatcgatcagctgcgtaaagagctggggtgcgccgtgctgatggtctcgcacgatctgcatctggtgatggcaaaaaccgacgaggtgttgtgcctcaatcagcacatctgctgctccggcgcgccggaggtggtctcgatgcatcccgaattcatcgccatgttcggcaaccgcggcgcagagcagttggcggtgtatcgccaccatcacaaccaccgccacgacctgcagggaaaaattgtcttgaagaaaaccgggagccgcgaagcatgatcgaattgttacttcccggctggctggccggggtgttgctggctagcgccgccgggccgctgggctcctttgtggtttggcgccgcatgtcctacttcggcgacaccctggcgcacgcctcgctgctcggcgtcgcctttggtctgctgctggacatcaatcctttctatgcggtgatcgccattacgttgctgctggccctggccctggtgtggctggaacgccgcccgcagctttcggtagataccctgctcggcattctggcccacagcgccctgtcgctgggtctggtggtggtggcgctgatgtccaacgtgcgggtcgatctgatggcctacctgttcggcgatctgctttcggtcacgctgagcgacatcgtgatgatcgccggcggcgtcgccgtggtgctgttggtgctgtggtggcaatggcgcgatctgctgtcgatgaccatcagcccggagctggcgcacgtcgacggcgtcaatttggcgcgggcgcgtaccgtgctgatgctggtcaccgcgttgaccatcggcctggcgatgaaattcgtcggcgcgctgatcatcacctcgctgctgatcattccggcggccaccgctcgccgtttcgcgcgcacgccggagcagatggcgggtgtcgcggtactgctcggcatggtggcggttaccggcggcctggccttctcggcattttacgatacgccggccggcccttcggtggtgctctgcgctgccgtgctgttcacgctgagcctgttcaaaaaacaacaggcttgattaaagcccggatatgacaagggccgcatctgcggcccttttttattggcggattaaaaatttactcttcgcgttcgagaccaaagtgccggtaggcgtgctgcgtcgccagacggccgcgcggcgtgcgctggataaagccctgctggatcagaaacggttcaatcacgtcttcaatggtttcgcgctcttcaccgatcgccgccgccagattatccaacccgaccgggccaccggtaaacttgtcgataatcgccagcagcagtttgcgatccatatagtcgaagccttcggcatcgacgttgagcatatcaagcgcctgcgccgccaccgaaccgctgatcacgccgttggcgcgcacttcagcgaaatcgcgcacccggcgcaacaggcggttggcgatacgcggcgtgccgcgcgcgcggcgagccacttcatgggcgccctcgtcggacagctccagccccaggcacccggcgctgcgcgagacgatgtgctgcagatccgccacctgataaaactccagccgctggacaatgccgaagcgatcgcgcagcggcgaggtcagcgaaccggcgcgggtggtggctcccaccaaggtaaacggcggcagatcgagcttaatcgaacgcgccgccggcccttcgccgatcatgatatccagctggtagtcttccatcgccggatacaatacttcttccaccaccggtgacaaacggtgaatttcgtcgatgaacaacacgtcgtgcggttcgaggttggtcagcatcgccgccaaatcgcccgccttctctaacaccgggccggaagtggtgcgcaaatttacgcccatttcgttggccacgatgttggccagggtggttttccccagccccggcgggccgaagatcaataaatggtcgagcgcgtcgccgcgctgcttggccgcctgaatgaagatctccatctgctcgcgcacgtgcggctggccgacgtattcagtcagcagcttgggacgaatggcgcgatcgaggatctcctcttcgttgatcggttcggcggaaatcaggcgatcggcttcaatcattatctaccccttttcggccttacagggcggcgcgcagcgcgtcgcggatcagggtttcgcagtcggcgcccggcttggcaatcttgctgaccatgcggctggcttcctgcggcttatagcccagcgccaccagcgccgagacagcttcggcttccgcgtccgcttccggcgttttgtcggcggcggccggcaggctgatctcgctgctgttgttgaacagatcgccgttcagccctttgaagcggtctttcatctcgaccaccaggcgctcggcggtttttttgcccacgcccggcagcttgaccagtgcggtgatctcttcgcgctccaccgcgctgacgaactgctgcgcggacatgcccgacaggatggcgagcgccagtttcggcccgacgccgttgaccttaatcagctcgcggaacagcgcgcgctcctgcttgtcgttgaaaccgtacagcagctgcgcatcttcacgcaccacgaagtgggtaaacacgatggcctcttgccccagttccggcagctcgtaaaagcaggtcatcggcatgtgcacttcataacccacgccgttcgcctccagtaacaccagcggcggctgcttttccagaatatttcctctgagacgacctatcatttaccctcctgcagaatgaccaggcatggcgccctgccatgccgttgctggtaaagcttataacataaaaaaggctggatgaatatccagcctgagcaatcatcgtttcgcgtcagcgcaaacgcccgcgcgccaggttcagccgcccttcgctcattcgcagcacgttctggctgaggtggcagtgggtgatggcgatggccagggcatccgcggcatccgcctgcgggtttgccgagagtttgagcagcgagcgcaccatgtgctgtacctgcgccttttcggccgcgccggtgccgaccacggtttgtttgacctgccgcgccgcatactcgaacacttccaggttctgattcaccgccgccacgatcgcgacgccgcgcgcctggccgagcttgagcgccgaatccgggttcttggccataaacacctgttcgatggcgaagaaatcgggctgaaactgggtgatgatctcgctgacgccggcgtaaatcagcttcagccgcgtcggcatgtcgtccaccaccgtgcggatgcagccgctggcgatatagctcaactggcgcccctgctggcggataaggccatagccggtgacgcgcgagccgggatcgataccgagtatgatcgccatatctacatccaccttgcatgcacggcgccgccgaacggcggcgcccgttttaccgaattacagcgtcgccgccacttcgtcggagatttcaccgttatggtaaacttcctgcacgtcgtcgcagtcttccagcatatcgatcaggcgcaacagcttaggcgcggtttccgcgtccatgtcggccttggtcgatgggatcatcgacacttccgccgcttcggcttcgaagcccgccgcggtcagcgcgtctttcaccgcgcccaggctttcccaggcggtgaacacgtcgatggcgccatcgtcataggtcacgatgtcttccgcaccggcttccaacgccgcttccattacgctgtcttcatccaggcccggtgcgtaggtgatcacgcccttcttggtgaacagataagccacggaaccgtcggtgccgaggttgccgccgcatttggtaaaggcgtggcgcacttccgccacggtgcggttgcggttgtcgctcaggcattcgatcatgacggcggtgccgccagggccgtagccttcatagatgatggtttccatattggtatcatcatcgccgcccacgccgcgcgcgattgcacgattcatggtgtcgcgcgtcatgttgttcgacagcgccttgtccatcgccgcgcgcagacgcgggttggaatccggatcgccgccgcccagcttggcggccgtgaccagctcacgaataatcttggtgaaaattttaccgcgcttggcgtcctgcgccgctttacggtgctttgtgttggcccacttactatgacctgccataaaaaatctccgaaaaaaactactggactgaattgatcacgaactcttcaatcgcctgctgattgctccacgacttggtcaacttcacggcctcggccgcctcaagccattggtaagcgtgatgctcggtaatcaccggatcgcgctcctcgggcaacgccagacagaaccagtgctctttattgcgcgtggttcccggcgcatagcgatgtcgcaaatggacaaagagttcaaactccacgcagcgctggcaatcgaacaacggcaggtgctctgcttcgatatcgatgcccacttcttccatgacctcacgccgcgcggcatgcggcggcgactcatcctgttccaggctgccggtgaccgactgccagaactcggtatcgtcgcgccgctgtaacatcagcacccgaccactggatttcgcgtaaatcactaccaggatagattcagggcgcttgtaactcatcactcgctctcttgttccgcaccggctttctttaccacgctgatcgccagctcctgcagcgccgccgggttggcgaagctcggtgcatcggtcatcagacaggccgccgcggtggttttcgggaaggcgataacgtcgcggatgttgtcggtgccggtcagcagcatcaccagacggtccaggccgaaagccaggccggcgtgcggcggcgtgccgtacttcagcgcgtccagcaggaagccgaacttctcgcgctgttcgtgttcgtcgatgcccagaatgctgaataccgtctgctgcatttcgctgcggtgaatacgcaccgaaccgccgcccacttcgtaaccgttgatcaccatgtcataggcgttggcgatagcgttgaccggcgcagcggccagctcttccgggctcatgtcgcgcggcgaggtgaacgggtggtgcatcgccgccaggccgccctcttcgtcttcttcgaacatcgggaagtcgaccacccacagcggcgcccagttgtcgagttgggtcagccccagatcgcgacccagcttcaggcgcagcgcgcccatcgcatcggtgacaatcttgaaactgtctgcgccgaagaacaggatgtcgccggtctgcgcatcggtgcgcgccaggacggcttccagcacttccgcgctgaggaatttggcgatcgggctctgcacgccttccatgccggcggcgcggtcgttgaccttcagccaggccaggcctttagcgccgtagatgttgacgaaagcgccgtactcgtcgatctgcttgcgggtcagctgtgcgccgcccggtacgcggatcgccgccacgcggcctttggcgtcattggccgggccggagaacactttgaactcgacgtccttgaccaggtcggccacgtccaccagctccagcgggttacgcaggtccggcttgtcggaaccaaagcgacgcatcgcttcggcgaaggtcatgaccgggaaatcgcccagatccacgcccttcacgtccagccacagttcgcgcgccagcttctccatcacttcacgcacctgctcggcggtcatgaaggaggtttcgacgtcgatttgagtaaattcaggctgacggtccgcacgcaggtcttcgtcacggaagcatttgacgatctgatagtaacgatcgaagccggacatcatcagcagctgtttaaacagctgcggagactgcggcagcgcgtagaatttgcccttgtgcacgcggctcggcaccagataatcgcgggcgccttccggcgtcgctttggtcagcatcggcgtttcgatgtcgaggaaaccgtggctgtccataaagcgacgtacgaagctggtgattttggcgcgggtcttcagacgctcggccatttccgggcgacgcagatcgaggtaacggtatttcaggcgcgcttcttcgctgttgacctggttggagtccagcggcagcggctcggagcggttgatgatctcgagcgcgtgggcgaacacttccacttcgccggtggccatatctttattgatctggctgtccggacgcgcacgcacggtgccgacgatctggatgcaaaattcattgcgcaggtcataggccttgtcgaacgccactttctcgtccgggtcgaagaacacctgcacgatgccttcacggtcgcgcatatcaataaagatcaggccgcccagatcgcgacgacgattgacccaaccacacagagtgacttcctggcccacgtgggacagattcaactgcccgcaatattcagtacgcatacgctatccttttacacagccgatgccgcgccgggctactgcgcccctgtcgcgcggctgttatctgataaattctacttgttgcccggtttaaaatccgtcgcataccagccggtgcccttaagctggaaaccggaagatgaaatcaacttggtcaacgcgggctgcccacacgccgggcagtctgccagcggcgcatcggaaaatttttgcaatttctctaaccgatggttgcaagcaccacatgcatattcataaatcggcataggtcgttggattaaagagtgttgaaaaaagggagtcattataaaggaaattcatccgcccgataagtgcgaacacagcattgttactgcactaaatggcgcgtttttgttcgaatcaacacatcggttaacaaatttcccattaacctgcgacagttttttcacgtagcctgattctcccccggttttgcgccgaacgcagctcgcccgacgcgccgaacagtttttatccacttcgcaacgagatgaaatccatgctgaaacttgacgcccaaaccaccgctctggtgctgatcgatttgcaaaacggcattctgccttacgccggcggcccgcacagcgccggccaggtggtggcgaacgccgccctgctggccgcccgttttcgcatgctgggcgcgccggtgctgttggtgcgcgtcggttggtcagactccttcgccgaagcgctgaaacaaccggtggataaaccggctcccgcgcccgccggcggtttgccggccagctggtgggaattccccgcgccgctggcggtctgcgacaacgatattctgatcaccaaacgccaatggggcgccttctacggcaccgatctggacttgcagctgcgccgccgcggcatcaagtccgtggtgctgggcggcatttccaccaatatcggcgtggagtccaccgcccgcgccgcctgggagcacggctatgaactggtgatcgccgaagacgtctgcagtgcgcagaacgcggaaatgcaccgtttcgcgttcgaacacatcttcccgcgtttggcgcgggtgcgcgacaccggcgaaattcttgccgcgctcgagcggtaacgttaagttgtagcctgataagccaagcacaagtaaaggaagacgacgccgtgatctacatcggactgccgcagtggcaacattcagcctggaatcgtatcgggctgcgtgatttggcggattacagccgctacttcaactgcgtggaaggcaacaccaccttctacgcgctgccgaaactggaaatcgtgcagcgctggcgcgacatgaccggcgacgattttcgcttctgcttcaaattcccgtcggacatcagccacaaggccgccctgcgcaactgcgccgccgagctacaggcgttttaccactgcctgagcccggtgcatcagcgcatcggccagttgtggctgcagctgcccgccgccttcggccccgatgagctgccgcgcatgtggcagttcttcgaaagcctgccgcaggagttcacctacggcgtagaagtgcgtcatccggcgtttttcgccaagggtgaggaagagcgcgcgttgaatcaggggctacaccagcgcggcatcaatcgggtgatcctcgacagccgcccggtgcatcacgccgcccccaataccgccgccgtgcgcgatgcccagcagaaaaaaccgaagctgccggtacacgctctggtcaccgccgaccaaccgttggtgcgctttatcggcggtgaccaactggccgataacctgcgctggttcgaagcctggcaacaaaaactgccgctgtggcagcaacagcatcagccctatctgtttattcatacgccggacaacggcgattcgccccagcaggcgcaaaaaatttggcaacagttgcgtctggcgatccctgatttgcctgcgccgccagactggccagaacaagatgcactgttttgacctattaatctgaccaataacatcaaatatttccccgcgacagtgaatacaatgacggctatgatgctggctgccagttttggttagggaacggagttaaaaatggtaagcgcgctttatgtggtgctcggcgcattgttgttgatcaaactctcttatgacgtagtcaggttaaggatgcagtaccgcgtagcctacggcgacggcggtttctacgaattgcagaccgccatacgcgtgcatggcaacgccgttgaatacattcctatcgctgccgtattgctggtgatcatggaaatgaacggcgcggaaatctggatgattcacctctgcggcctgatgctgatggccgggcggttggtgcattactacggtttacgcaaccgcgaggttcgttggcgccgttcaggcatggccgcgacctatatctctttgttgttgatggttctggcaaatatcttctatctgccttgggatctgattttcagcctgcactgatcccgttttatcatcaggcggccgcgccgcctgcttccgctccgcttttttgcgcttttctgttagactacgcagcttcgaattctgaactgatttgccgctatgccaaaccgcgatactcttttctccgcccccatcgccaaactgggcgactggaccttcgacgaacgcgtcgccgaagtgttccccgacatgatccaacgctccgttcccggctattccaacatcatctcgatgatcggcatgctggccgaacgttttgtgcaacccgacagccgggtgtatgacctgggctgctcactgggcgcggcgacgctgtcaatgcggcggaatatcaaggtgcccggctgccatatcgtcgccgtcgacaattcgccggcgatggtggaacgttgccgccgccatattgacgccttccgcgccgacacgccggttgaggttatcgaagccgacattcgcgacatcgacatcgaagacgcctcgatggtggtactgaactttacgctgcagttcctcgagccggccgatcgcctgcgcctgctggagaaaatctatcgtggcctgcgcccaggcggcgcgctggtgctgtcggagaagttcagctttgaagacgccgaagtcggcgagctgctgttcaacatgcaccacgatttcaaacgcgccaacggatacagcgagctggagatcagccaaaaacgcagcatgctggaaaacgtgatgctgaccgattcggtggaggcgcacaaggcgcgtctgcaacaggccggattcgagcatgctgaagtgtggttccagtgcttcaacttcggttcgctgatcgccctgaaagcgggggatgcgcaatgatcgaattcggtgatttctatcagcgcattgccaagagccccctcagccactggctggatacgctgcccgcgcagctgagcgcctggcaacgcgaatcgctgcacggcaaattcaagcagtggttcaactcggtggagcatttgccgacgctgacccccacccgtctcgatctgctgcacggcgtgcgcgctgagatggagcctggcctgtcgccgggccagcgtgaaggcgtcgagaaaatgctgcgcaccctgatgccgtggcgtaaagggccgttctcgctgtatggcatcgatatcgataccgaatggcattccgactggaagtgggatcgcgtgctgccgcacatctccccgttggccggacgcaccattctcgacgtcggctgcggcagcggttatcacctgtggcgcatgatcggcgccggcgcacactttgccgtaggcatcgatccgatgcagctgttcctgtgccagtttgaagcggtgcgcaaactgttgggcggcgatcagcgcgcccatctgctgccgctcggcatcgagcagttgccggaactggcggcgttcgacaccgtgttctcgatgggcgtcctgtatcatcgccgctcgccgctcgatcatctgtatcagttgaaaaatcagctggtagctgaaggcgaactggtgctggaaacgctggtggtggaaggcgatcgccaccaggtgctggtgccgggcgaccgttatgcgcagatgcgcaacgtgtatttcattccttccgccgaagcgctgaaatgctggctggagaaatgcggcttcgttgacgtgaaaatcgccgatatgtgcgtcaccagcctcgaagaacagcgccgtacagactggatgaccagcgagtcgctggctgaattcctcgacccgaacgaccgcagcaaaacggttgaaggctatcctgcgccgctgcgcgccgtgttgaccgccaaaaagccctagcgcttgctaattgggccggcctgcgccggcctcaacttacccgttgccggcatcgacaatccgcagctcatacaccatcgtcgcgttcggcgggatctgcggcgcatagcccgtttcaccgtacgccaacgccggcggcaccaccatcgtcagcgagccgtgatttttcagatggccgatcgcctcacggaacagcggcggataggcggagagcggctgtgacatcacctttccactgcgatccatatcctggatcacgctgccgtcggtcaagctctctttcaccacgatgtctacccgcgcgttttccgcaatggtttcatcccccatataatcgatgcgataccagaagccggaaggcgatttctgcgtgcccttcttctttttgaactcggcaacaaacgcttcgcctttgctggtttgcgccttcgccgcctggcttctggcgtcgttcaccgctttttccgactccgccaatgcgctggccagctgcgcatcgctcaactggtaatggccgttgaaggtatcaattacacccgccagcagcacagttttatcgggtgtgataccccaatttttacgctccgccagcatcgtttgaatgtcgcgccccagggcgacgccggcagcatagctctgttgttccggctttttcttcagcgttttcacctccggcaaccatttggcccgcgatctcagcccgctcaattcgtcttgcaaagcttgctgagcctgatgggcggcagccagctccgccgccgttttatccgcccgttgcgtcgcttcatccctcttctgcgctgcctgcgcgctttccgccgtcaccgccgccagacgttgttccagcgttttggcctgcacggtttgcgttttgtttttttcctgcagttgcgccaactgccgctgcagttcctccgtcgctttggcggcttctatcgcctgctttgccagcgccgccttcaggctgttctcttgctgctcggcctgctggcgttggccatcacgctctttttgcagcgctgccagttgctgctgaagttccctcgtcgctttggcggtctcggtcttttgctgctccagcgccatcttcaggtttttctcctgttgttcggcctgatgacgttgaacaccctgttctttctgcagctgtgccagctgccgctgcagttcccccgtcaacttgtcggcttcggcctgttgctgcgccagcgctgtcttcaggcttttctcttgttgcccctccagctgacgttggacaccctgttctttctgcagttgtgccagctgccgctgcagttcccctgtcaacttggcggcttcggccttctgtcgttccagctcagcggcggccgcttttttgtcctgttcataacgctgacgcgctttatcgttggcggtttgcgccgccgccagcttctcctcccaaacctgctgccgaacgttttccgccggtttaggcaaggccgccagccgttgttccagcaaggcaatgcgccgatctcgctccgcggtttgttgcttttgccgcgctaacgcggcttgcgcttcggcgatctgcgcctgagccttgcgctcctgcggcgtcagattcagcgcctgtcgcacgccgctggcgaagtcgctcaaggcgctcagatcgggagcaggtgccggtttatcggcagccgtcagggatgacgcaacgcgcagcgcggtcagctcctgctgcagtgattgaatagcggcttgctgttgttccaatcgagtctctttctcacgcagcgccttttgcaactgcgtcagttgctttctctgcgcagccgtttcacgaatctgaaccggccgggacgccggcttttgggtttcctgagatggggtaaccacggtatcagccgccggtgcgtcctgccgctgataacgctcggcaaactgcaataacgccggcacatcgtcatccgccgcggccaccgccggcgcaaacgccagcggtatcatcaggctcagtaatgcctttcttgcacgaggggtcattgggcgcgttctccgcgctcagccaggccggtcatcatggcagaactgatgtctgcgcagaggcggctggtgcgataacgatacagcgcgtcgacggtttcctgcgtgcccgtgttgacccgctggcgtaccccggcatactgcgcggcgccgctcatcaaggtatcgaactcgcgtttgaatttctgatatttctcgttatccatgccgcgcatggcatccagttcgcgctggcactgttgcatgcgctcggcctcacgctgccgcttatcttgctccgcaacttcttctgcactgggcggcttactcaatgtagaaacgggccgcttggcggtctggcagccggtcagggccaacgtcagtaaaagcgccgcggtccaacagtgtgccgttcgggtcattatcattatctccttgttaaatccgccgccaacgcgctctgcagtcgagctgacggctctcctcattgatgctgtgatgttccggccatcagccaagctgtgttcggacatgaaaatgcagacgcagcattgagaggcatggcgccaatcatttactgcatcaatacatatcaaaaaatcatttaatattatgatatttaaaggattttaactcacaaacttatcagcaggacatgacgatcgcaagaagagatggggggttggtcgaccgagataccacgttgaaacgggcgaatggtctttacaaaacataaaaaaagccccggcaaaacgccggggcctgactttacgctgtatcagcgtcctacaaaccttatcgactgtttcaatcgtcccatctgattgacaatcatgttgccaaccaacaggagaaattccatgagcaatatgattagtgtaaataatatcagtgaattgcgtaatctgacgccagttacagatgaccagattgtctttttagtttctcacgccgccggacgtttcgccggcggcggagaattctattatgcgaaaacggatacaaccagtgcggataataacggcaccgtggtggttacatcgggaggagcccgctggaaacgactggagcagaaacttagtttcgatcacttcggcgccgatcccagtggtacctccgcctcggatgcagcaatcagcgcgacattaaactatgccgcgagtttaaaaaacaaagtggtctatgcttcggaaaatgctcaatatctgctgaccagtgctcaacctatcaacgtcgctagcggcgtcactgtgagaggctcccgtcgcggtattgctcaaggccctgcaagcctcacaagcaatggccctaatcgggcaggccttgcggacgacagtgctttcattatcaaaaaacccgcgggtacggtttgtttcgcctgcgataagaatgttgtctttgatggttggtcgttcctctacccggatcaaaaatatactgccacccagccggagacattcgttcaatacggtgccaccattaccgcaggtggcgctctgtcagtcgccaactgccgttatgtaggcgcctatgactttgttgaagctcgaggagaagccaacaactttgagaatatctacggttgggcagtccgctgtgactacagggtttatgaaagcagggacatcaacagatttaccaatgttcacgtcaatgccaatgtcgtgcgtccgacagaaaacgcggttactgcctctatcgccgtagccggttcttgtgctttcaatttcgatcgccacgacaatacgtttatggtgaatgtattctcttatggcaaaaagatctttatcaaaaccacaacacaaggaacttcctatttaggcggtctcagcctaagcaatttcatggcagacagaaatggtaccggcatcgatatcgactcagattcctccgccaatattcaaatcgccaacggttcctacatcaatgattatggtgatgccgttgggggattcctggtattaagaaaatccaccagccaatctaatatcaccccagttcaaatcagtaatgttaacttcgctaccgccaatgggcccaagggcacactgtcgccccaggctattcgcttcgaagctaacgctgggtatcaactctcattcagcaacaccgttatgccaatgtggacaaacggcagtctgaacaatgaagctggttacaacattctcagaggcacactgggcattgcacagcgcagttatcagctgcatgaggccccgctaaattatttgacgaacagcaatctgatcgccatcggtgctgacaatcagcctacaggctggtttatcgacgggaaactgacggtagacagcaatcttctgacagccactggcgacaacccggcctacaaaggtttgggtcaacgtattcatcggagcatgggaccgaggacattctgggccatcgcatcctctatcggcgatcaatctaccgcgcaagcttcgactggcatttgggcccgctcgttcaacgataactataccgacactgtcgagagcaatcaggctattccctggatacgcatcggcaacctttactacgcgcgttttgtcatgaacaacaatcgcactatccacgatatcttggtcaatcccggcagtggcaataatacggtgcgcattttagcctgcggcattagcccgggtgaaatcttcgacttctcgcctgacacgttgcaatagtctctcgcggcataaaaaaagccccggcaaaacgccggggcctggtacttgcgtgatcgccgagggcttcagtgacacgcaaaggggtcttacggcccggaaaccggttgtcaaacgcggctaactgcgtgcttatgcgctttgcgccagaggatcaaccaaggccagcgcgtttttcatcgcctccaccatttcgccatccacgcaataatggctaaattcgtcaaactcgttatcggagcacatggtgacgcccgccttgcgataacgcatggtcgacggcaccagatggccggaagagctgtgcagttcatgcaggccgatatcgacaaacttgtgcagattgctgaggcgcacgccggcacccgccatgatcaccggaccctggctggcctggcgcaaatcgcgcagcaacggcaggccaagttcggcgctctgctgctggccggaggtcagaatgcgcgccacacccagttcggtcagttgctccagcgccaccatcgggttctggcacatgtcgaacgcgcgatggaaggtcaccgccatgccctcgcacagcctcatcacttcgcgcatgcgcggcagatcgatgtgcccttcgtcgtccagcatgccaaccaccacgccggggaaccccatctcgcgaatttggcggatatcttgtttgatcacttcgaaatccaccgcgccgtagcagaaatcgccaccgcgcgggcgaacgatcggatgcaccgggatcgcaacccgctcacgcgccagacgcagcgtgccatagctcggcgtcaatcccccttcgctctggctggcgcacaactcgatgcgatcggcgcccgcccgttcggccgtcagcgcacagtcgacgctaaagcaacaaacttccagttttatcattgtcacccccagataacggccaacatacggcggcaattgttcatttcttcatttctcacgtaggctcatgcataggcataaaccggctcagggttatcactatggcattcaattttgatcaatgggtagaccgcagtcacagtgacagcgttaagtgggataaatatcgcggcagcgacatcatcccgctttgggtcgccgacagcgatttcacctcaccgccggcggtgatcgaagccttgcagcgccgcgtagcacacggcgtattcggctacacccacccatcccctgatcttattgaggtttttacccgccgcatggtagagcgctatgattggcacatcaagcctgaatggatcattttcctgcctggcctggtgtgtggcctgaacctgtgcgtgcgggcctgcaccgaacaacatcagagcacgctggccccctcgctcatttatccgccgtttcgcaaagcggccaaattcgccgggcgtaaacaccttccggtatcgctaacagcggtcaaccagcgttggggactggatttttcctcgatgcatgatcagctcaacggcaacgaaaaactcctgttgctgtgcaacccgcagaaccccggtggcaccgtgtatcgccgagaggagttgttgcagcaccatcagttcgctcgcgaacacgatttaatcgtctgttcggatgaaatccactgcgaactgctgcttgagcccggcgcgcggcatatccccttcgccaccctgaatgaagacgcggcccaacgcagcgtgacgctgatgtcaccgtcaaagacgtttaatctcgccgggctcggcgcctcaatggcgatcgttcccaacgaagcattgcgacaaaagctgaaacgcgcgcgcagcggcatcgtgccggaggtcaatctgttggcgctggtggcggcgcaggcggcttatcaatacggacaaccctggctggatgagcagttgatttatctgcgcgccaatcgcgatcggctgacaaaacgtatcaacgccatgccgggattgacgttgctgcccgtcgaggccacctatctggcctggatagactgcagcgcactgccggtagataacccgcatcagttcttcgaacgtgcgggcgttgggttaagcgccggcctggacttcggcgatcggcgctttgtacggcttaactttggttgccgatgggctctgctcgatgaagcgctcgatcgcatggcgcgcgcctgtgcggcgctgcctggctaaccttgttcgctggcgacgatgtctcgaatggaatacggatgaaacttgatcgtaaccgttccgtcggtgatggccagcgtcgggttcggtagccgctcgccctcgccttttggcgagctttgcttcagcttgatccccggcgccaacaatgcctcatcggcaaggtggctcaacgcccgagcgtacagcgtctgaggatcgccactgagcactaattcgacgtgttcccagccttcgtgcggatagcgtttctccccaggatacggcagctcgatgcagtctatccgccacggccctacggccagcggctgagacaaatcgaacagacagataggccgcccgttgatcatcgattcggatagcagtgtcccgcactgcatcagcccctggcgccaacgttcggcggtggcattctggtgacagcgcaaagagatgtgatcggcggtgaacgcggccagatcaagccgcaatttggcggcaaattgatgcagcgcctgctcgaaacgcggcaaatcgagcttcagatcgtcaagctcggcaatggcctgcaagggagtggtcatagaaacctcaaaacaacggagcgcaaagttaaacgcggtaatttacacggtggcggcagtgctcgccaccgttacgacgtttttcggcgtcagttcagaatgatttttggttgcggacggggagaatgaaaaaccagtcccttattaagatgactgcttattaaaacaacagaaaaataaaaaataagatttttcgcaagccattataccttttcttcatgacgctatgatttaagttattttgcacaaaactctctgcagcccattggtcaactcgattgaatagtctggtttaatcaaacctgatccacttatcgaaaccacataaaaccataagcataacctattgtaaaagaaggcaataaaccccattaattgatgggaagctaaggattatcttaattttcccccaggcaattgattcaccaagacaactcagctactttggaggaaatttaaattcgagatgatcattatgttattgctgacgatatccttggtgttgataattatcgccgtatacgccatctaccgtcatttcaaatcacgcagcgccaacacgctggatgccggtcgccgcaataaaaagcgctagcttcgcaactctccccttcgtacattctgttcagatcattctgctttcaccttccggcaatcaacgcgccgccctcgacaactgtttcatcgcagcggccgcgccaactgctgacgggctccgtcagatcggttacaattacaggctgttttgtggcggtcgcccatcgcgcccgccaccgttgaatcccgcaggggctggcttcagcccctcgttcgtcattaaggtaacccggtgaatattcaggttcttctttcagataaagtcagccaggcgctgatcgccgctggcgcgccagccgattgcgaagcgcaggtccgcccttccgccaaggcgcagtttggtgattaccaggccaacggcgtgatgtcagtcgccaaaaagctgggcatgccgccccgtcagctggcggaaaaagtggtgcaactgctggatctcggcgacgtcgccggtaaagtggaaatcgccggtcccggctttatcaacattttcctgaacagcgattgggtcgcccgccaggccgatcaggtgctgaacgcaccgaagctgggcattgcgccggttgagccccaaaccatcgttatcgactactccgcaccgaacgtggcgaaagagatgcacgtcggccacctgcgctccaccatcatcggcgacgccgcggcgcgtacccaggagtttttgggccataaagtgattcgcgccaaccacgtcggtgactggggcactcagttcggcatgttgattgcctacctggaaaaaatgcagaacgaaaacgccagcgacatgggcctgtccgatttggaacagttctatcgcgaagccaagaaacactacgacgaagacgccgagttcgccgagcgcgcgcgcgcttacgtcgtgaagctgcagggcggcgatcagtactgcctgaaaatgtggcgcaagctggtcgacatcaccatggcgcaaaaccagctgacctataaccgactgaacgtcacgctgaccgaagacgacgtgatgggcgaaagcctgtataacgcgatgctgccgggcatcgtcgccgatctgaaagccaaagggctggcggtggaaagcgaaggcgccaccgtggtgttcctcgacgaataccagaacaaggacggcgacccgatgggcgtcatcatccagaaaaaggatggcggctacctctacaccaccaccgatatcgcctgcgccaagtatcgctacgaaactctgggcgccaaccgcgttctgtattacatcgactcccgccagcatcagcacctgatgcaggcctggaccatcgtgcgcaaagccggttacgtgccggagtccgtctcgctggaacaccacatgttcggcatgatgctgggcaaagacggcaagccgttcaaaacccgctcgggcggcacggtgaagctctccgatctgctggatgaagccatcgaacgcgccgaacagctgatcgccggcaaaaacccggatatgccgcaagacgaaatgaagaccgtggcccgcgtggtcggcatcggcgcggtgaaatacgccgatctgtcgaaaagccgcaccaccgactatgtcttcgactgggacaacatgctggccttcgagggcaataccgcgccttatatgcaatacgcctatacccgtgtggcatcggtattcaagcgcgccgggatcgacgaaagcagcctgacactgccgctgacgctgaccgaagagcgtgagattgcgctggctacccgcctgctgcagttcgaagaggtgctcaccaccgtcgcacgtgaaggcacgcctcacgtcatgtgcagctacctgtatgatctggccggcttgttctccggcttctacgagcactgccagatcctgaacgccgacagcgaagaaacccgtcagagccgcctgaagctggcgctgctgaccgctaaaacgctgaaaaccggcctggatacgctgggcatcgaaaccgtcgaacgtatgtaaaccgcaccgcgcggaaagtaaaaaggtcgccaaggcgacctttttttgttcttgcattcggctcaggcgacgcggcgcgcaaaatcacgcgggcggaagcccaacccggccagcacgccaaagtaggccaccacaccggccaccaccaccgccgccaaacgcagcaaacgttccagcatattgccctgatcccaggccggcatcagccacatcacgccaatcagcaccgccgacatcgccagcacggcgatcaccagcttagtgaggaacagcgcccaacccggctgtggctggaagatcttctgcttgcgcagctgccaatacagcagcgaggcgttcaggcaagccgccaagccgatcgacagcgccaggccggcatgcttcagcggaccaataaacgccaggttcatcacctgcgtcatgatcagcgtgatgatagcgatcttgaccggcgttttgatgtcctgccgcgaatagaagcccggcgccagcactttaaccacaatcagccccatcagccctaccgagtaagccaccagcgcgcgttgcgtcatcgccgcgtcaaaggcgctgaacttgccgtactggaacagcgagacggtcaacggtttggccaaaatgcccagcgcgatggcgctcggcagcgccagcaggaaacacaggcgcagcccccaatccatcaggcgcgaatactcatcgtggttgccgctcgagaagcttttggccagcgacggcagcaggatggtacccaatgccacgcccaacacgccggaaggaaattccatcaggcggtcggcgtagtacatccaggacaccgagccggataccaggaacgatgcgaagatagtattgatgatcagcgagatttggctgaccgacaccccaaggatcgccggccccatctgacgcattacccgccagactccggcatcgcccaatttgatgcgcggcagcaccagcatgccgatcttgcgcaggtgcggcagctggtagcccaattgcagtacgccgcccactaccaccgcccacgccagcgccagcaccggcgggtggaaatacggcgcggcgaacagcgcgaagccaatcatgctgacgttaagcagcgttggcgcaaaggccgggatcgagaagcggttccaggtattgaggatcgctcccaccagcgacgccagcgagatcaacagaatataggggaatgtgatgcgcagcagcgccgacgtcagggcaaacttgtcgggcgtatcggtaaagcccggcgcggtgagatagataacccagggcgcggccaacatccccagcaccgtcaccaccgccagcaccagcgtcagcagcccggagacataggcgataaaagtgcgtgtcgcctcgtcgccctgctggcttttgtattcggccaggatcggtacgaaggcctgcgaaaatgccccttcggcaaagatacggcgtaacagattcgggagtttgaacgccacgaagaaggcgtccgttgccatgccggccccgaacacccgcgcgacgatcgcatcgcgggcaaagcccagcacccgcgaaaacatcgtcatcgagctgacggcagccaaggatttgagtaggttcatgtggttgtctgataggtaccgtaaatatcaacgcctgcaacagcaggcgtcagtgaaacaatcggctcagtttacgcatccggaaaagaatagctaccgccagatgttacatagagttatcccgcagcaaacgctcgaccacccgctgggcaagcagcgcctgttcgccgccggtttccggcgcgctctgattggcgacggcatcaaggaaatgccgcaccgcaccgtcgaagccgcgttgcaccagcgtgctttgccagcccggcaccggttgttccaactcgccctgcgcatcttcacgcagccagtggcgcatatcggtcaactgatacagcgcgccgtctgtcaccgcctgcacgctttcgcgctggctgccgccgcggcgatgcatgctggtcgtcacctgcgtatcgccgcaggcgaagtgatgctcggcgtacagcatttcgcctgcggcgttggtgcgcacgctgccgctcagcagttgctcgccgccgcccgccagccacagcgccgtgtccaccacgtgcaggtaatcatccaacagggtaaaacgcagatcgtgcgggccgacgctgtccgcccgatgtttatccatgcgaatggaggccggctggttcatttgctgcttgagctgccggtaaagcggcgcgaaacgccggttgaaccccaccatcaacgttttgcctcgccgctcggccagctcaagcaactgctcgccctgctccagcgtctccgccagcggtttatcgacgtaaacgtgcacgccgcggttcagcagctcgcctattactgaaaaatggctggcggtgctgctgtgaacaaagaccgcgtcgcactgttcggccaggctgtccagccgggagaaacaggccatgcggtagctgtcgcacagcggctccgctttttgctgattgggcgaaaaaccgcccaccagcgtccagtccgtcgcctggccgaggattggcagataagccttctgcgcgatactgcccaatcccaccacgcctacacgcaatttagtcattcgcatccttcaccaacagatgttgcaactgccgtttcagttccgccacttcgctttctaatgcgctaaccctggcgctcagttcgccgtcgaactcggattcgaacgccgccgccggcgcttcatcaatctggccgctgaacagatgcatgaatcggctttcgcgcttgcccggctcacgcgccaggcgcaccacgaacggaccatcttcccgagtggccagctgttgcagcacctgttcaacctcgctgacatcgctgaactcgtgcatccgattggtacgggtgcgcagctcgccgggcgtttgcgcgccgcgcagcagtaaggtggcgatcaccgccagttcggcgggcgaaagtttcagttggccgaactcggagttgcaaaaccgctgttcgtacttcactacccggttgccgaatccgctgagggtgcgcaagaaatgtttgcgcagcaacagatcgagcagctgctgcacttcgctttcgctcagatccatcaccggttcacggttggttttttggttacatgccagcgtaatggcattcagcgaaagcgggtattgatccggggtcgtgacctgtttttccaacaggcagccgataacccgagcctctttggcgttcaattcatatttcatcgtttggcctcaacgtgggggtagccactctttattggtgtatgccgtcaaaacgtggtcttgccactggccgtcgatcagcaggtaatccttggcgtaaccttcgcgttcgaatcccagacgcgtcagcaatgcgccgctgcgctggttgtgcggcatatagttggccatgatgcggtgcatgcgctgttggcgcagcatatagcggatggcggactgcaaggcttcgaacatcagcccctgcccctgccatttctcccccagcgaataaccgaggaaacaggcgtgaaacgaaccgcgcagcacgttgctgaagttcgccacgccgcggacttcctgctcttctggatcgagcaggataaaatagtaggcgctgccctgcttttgcatttcagcgatcatccccagacgcgcctgccagccggaaggataacaatggctttcgtcgcgcaccggctcccagggtttgagaaaagctcggttctcggcataataatccgccagacgataggcatcccgttcatgcactaaacggaccaccatccggtcggtagtaagacgtacttttggcgatgcagagcggtagccgaacatcatttcccccgcagtcaaaacggttcgataagaagtatttattgggaagccgcgtggataatcatccgatgccgatctgatggcatgattttattttgccaatagcgcttcagaaccgcacttccctgcattcaatataaccgtagcccgcccccgaggtaaaacctcggtcgctcagtaaatcgccgaatacgcgttttacggcgtttttccgcccattttgcagcacaggtaacaccttgacgataaaaaaatattatctactccgcccctgtcgccgtccggcaattgggtagagaatggtggagttgccttccccctctctcttaattgctcatggtgatgcatgtctctggtgtcgcaagcgcgcagcttgggtaaatattttctgttgctcgacaacctgctggtggttttaggcttctttgtcgtgttcccgcttatttcgatccgcttcgtcgatcaattgggatgggcggcgctgatcgtcggcatcgcgctgggtttacgtcaactgctgcaacaagggctcggcatctttggcggcgccatcgccgatcgcttcggcgccaagccgatgatcgtcacgggcatggtgctgcgcgccgccggtttcgccaccatggcgatggccgatgccccctggatcctgtggttctcttgcgcactgtccgccctcggcggcacgctgttcgatccgccgcgcaccgctttggtgatcaagctgacccgcccgcacgaacgcggccgttttttctcgctgctgatgatgcaggacagcgccggcgcggtcgtcggcgcgctgatcggcagttggctgctgcagtacgacttccactttgtctgctgggtcggggcggcgatcttcgtgctggccgccggctggaacgcctggctactgccggcttaccgcatctcaaccgtgcgcgtgccgatgaaagaaggcatgctgcgggtcgtgcgcgatcgccgcttcctcacctatgtcctgacgctgaccggctactatatgctggcggtacaggtgatgctgatgctgccgatcgtggtcaatgaaatcgccggctcaccggcggcggtgaaatggatgtatgcgattgaagcggcgctgtcgttgtcgctgctctatccgctggcgcgttggggagaaaaacacttccggcttgagcagcgcctgatggcgggcctgctgctgatgacgctcagcctgctgccgatcggccttgccagcagcctgcaaggcgtgttcacgctgatctgctgtttctacctgggttcgatcatcgccgaaccggcgcgcgaaacgctgagcgcttcgctggccgatccacgtgcgcgtggcagctatatgggctttagccgccttggtctagcgctgggtggcgcgttaggttacaccggcggcggctggatgtacgataccggacgcacgatgaacatgccggagctaccctggttgctgcttggggcagtgggcttcgctacgttgctggcgctgtactggcagttcagcccgcggcgcagtgcatcgatgatgctgcgcggcggttaacgccatagaaatccggccgaatcggcaacagctgctatcctgttagtaaaaacccccacaggagcccgtcggcatgagtgaagaagcaaaattaccgcaactactcgaacatatgatactgaacttgcgcatgatttatgcgcgttccaccctggtggaaaaggccctggcccatatcctcgccagcgacgccggcctgaaaaacgatattatcaaacagctgcaggtcgtcaccgccgccaacgaacgtgacaaaatcgacctggaagaagctcgcattcacctgatcgatgtgctcaactcggtaccggccaagaaataacgccccctagcccgcgccggtgcgcgggcaatatcgcaataacgcaccatccaacacacgcacgtcaagacagcctcgataagctgtggtaactattgctgttaaaacctgacaacccggagcaagcatgaaactgttcatttacgatcattgcccattctgcgttaaagcccgcatgatttttggcctgaaacgtctgccgattcgtctggtcacgttgctcaacgacgatgagacgactccgttcaatctgatcggccaaaaaatggtgcctatcctggtcaaagacaacggcgaagcgatgccggaaagcctggatatcgtgcgctatgtcgataacctggacggcaagccggtgctgaccggccgcaccaacccggccattgccgagtggctgcagcgggtcggcgggtacagcgcaaaattgctgttgccgcgtattgcgcatgccgatttcgaagagttcgccaccgacagcgcccgccgttattttatcgataaaaagcaggggtcaatcggtgatttcgccgagcatctcgccaacagcgccgatctgatcgcccagttggaggccgatctgcaaaccctgtcaccgctgatcgtctccgccgaagcggtaaacggcgaactgtccgaggacgatatccacctgttcccgctgctgcgctcgttgtcgatcgtcgccggggttgcgctgccggagaacgtggaaacctaccgcaaccgcatggcgcagcgctgcgaggtgccgttgctgctggacatggaacaataacgtttgaataacccaaaggatagggcgtactgatgctgaaaatggtgctcgccaccgctcgcgatcgggcgcggctgaaggaaattacctccgttctgattcgttacggcctgcaagacgttctgcgtctgctgggcctgggggctttgctgcgcggcgcccgcgcaggatccgtccaacaggacgcacaaaccctgcccgagcggctgcgcgaagcgctcgaggcgctgggcccgaccttcgtcaaattcggccagatcctggccacgcgttctgatcttctggatccggcctggaccgacgaactggatcgcctgcacagccaggcagcggtgttgccatgggaaacgctggcgccgcaaatcatcgccgatctggggggcgagcccgagcagcagtttgccgaattcgatcgcacgccgctggccgcagcatcgatggcgcaaatttaccgcgcccgcttgcacagcggcgaacaggtggtggtgaaagtgctgcggcccggtttggcgaaaaccatccacgccgatctgcggctgctggcctcgctggcggaaaccgtggagcagcagagccccgcgttggcgcgctatcggccgcggcagatggtcagagcgctggcgacggcgctgaatcatgagctggatttgactcacgaagggcataactgcgatcgcgtcgccgggatgttcgcgcatgaacccgatgtggtcgtgccgaaaatctattggcaatggtcttccccgcgcctgttagtgcaggagtacttgcccggcaccgcgccggagaaccctcagcaattggcggcggcgggctttgacggcccgctgctggcgcaacgcggcgcgcgcgcctttatgagcatggtgctggagcatcggttgtatcacgccgatcctcaccccggcaacgtcatggcgctgagcggggaccgcgttggctttatcgacttcggcatggtgggccaactgtctgagcggcggcgcaatcagttgcttctgctgctgcaggccattgccgatcgtcagtccgaaggcatcgtcaacacgctgatcgcctggtcggacagcgaaccgctggatctgatggatctggagctggcggcgcaaaactttctcgacaaacaggccgccgccaccctgacgttgggcaaggctctgaccgacctgctggtgatggcgcgtgaacaccagttggcgctgccgcccgatctggtgctgctgttcaaggcgttaatcaccgccgacggcgtgttgcaccgattggatccggccttcgacatcgtcgccacgctcaaaccgatgctgcaacaaacggtgctgcaacgctatgcccctgacgccgtgcgccagcggttgctggccctgggcggggaagcgctcgacgccggggaagaactgccgcaaaccctgcggctgttggtgcgccgcctaaaacgcgggcagctcaatgccgatatcaacgtcagtaatctcggccagttgagcaaagcgctggaacgcgccgccgtcaccctggctatcgccattgtcaccgccgctttcgccctgggcctggcgccttatctgatgcactcctcactgcagctgtggggcattccgctgttcccgctgttgggggccgcggcctgcctggccggcgtgatcctcctggcgctgcgattgcggcgctgacgctttcggcgttatccgataggtgtcgcccgtttttgcgcgcactatcctctgcacatcgccgcctgccgttttcaggcgcaggcggaacgtttataatgattaatcaattatctgcagcacttttcgccagcagtcgcaatgaggcattaatgaagaagatcctgatgggcgcagccgccctgctgttcgccggcgtattggccggttgcaatcaactgacccagtacaccctgagcgagcaggaagtgaatgattacctgcagaaacataacgactatcagaagcagatcggcgtgcccggcctggtggacgccaacatcgtgctgacgcagctgcaaagccagatcggccgcagcgagccgggtaaagtcaccctttccggcgacgccaaggtcaacatcacgtcgattctcggcccgcaggcggcggatctgaagctgacgctgaaagcgcagccggtttacgaccgcgcacagggcgccatttacctgaaagacatggaactgaccgattacagcgtgcagccggaaaaaatgcagacggtgatgaaagcactgacgccatatctgaaccagtcactgaagtcttacttcgaccaaaagccggcttatgtgctgaatcctgacaacagcaaaaccgaagcgctggcgaaaaaactggcgaagggattggaagtgaaaccgggtgagttggtgataccgttcagcgactgacgccgtctggggacatcaagcccgccgccaggcgggctttttattgccaaaaaagcgttactgcggcgcgctgtaggcgatctcgccggtgttgcagttgagcgtcacgttgtaggttttatctgccttggtgccacgcaccgtcaacggcacctgccacacctgatccttgccggtgatggcatccgggctaacccaggcgatcggggtggcggtgcccagcagctttttgtccgattcccagcgcgtgatgcggttctgcaagaagtcgcgcttgacctgggcggcgatatccgccggctgcagaccggcacactgccccaccttggcggcgcgctgctcgtgatcctgcgcccacaccgcagtcgatgctcccatcatggccaacaaggcgatagccaaacccgtttttttcatatctcctcccgttgtgattagcgctatccgggccccatccctggctcacaacagggtttcggcaaagggtttaccgtttgacgaactcgatgacaaacagcgcatccaggcccggatagatttccttgatcacctgcttcaattcgccgagcgacatgttctcctgctgtgcgtggcgttcagtcagcgcgtccaggcgcaccggcgttaccgacagcacttcgataaagcagaaaaatacgccgtcttcattgcggcttacgcgcaatacctcgcccggttcgaagtgcgactcactggcatcccgaatggtgatggttttgcgcccggccagaatatcttgctcaaagcggctgaagaaagttatttcacggctcattttagatcctttttcatcacaacaccgcaacataagtcattatgccgcttgcttttctgacgcagatccctcttttgagttagaggccgcttttttcgctttcgcttccgccggtttcttgagggtttccgccggtgaagcgccgcgcagaatcagacccagcgcatctttattctctgccaggaagaagctcagcccttcgcgctgttcgtcgtccaggttcagcggcgcctgttgcagccactctccgaggttatccgccagatccagcattttgtcgtaggcgtcggcttctttcttgctcgcgaaagtcattttttcctcaccgtttctcaccaccacatatttaacttcaaccgccatgcgtgcgtcctcaaatactcaaacaactgtaattacatacagtataaatagataatggcgggagggcaaaccgccgcccgccttcggcttatttcagcagccgcaccttgcagctcttgcctttgattttgccctgttgcagctgttgcaacgccttgcgcgcgctggctttacggatcgcgacgtaggcatgcaccgggaacatgtcgattttgcccacttccgccgccgtcagcccggcattgccggtcagcgcgccaaggatatcaccgggacggatcttcgccttgcggccgccgtcgatgcacagcgtcaccatctctgcctccagcgagccgttggccgccccgctcagctcggacaccggcgcccaatcgacggtcatctgcaggtagtcttctatcgcatgcgcccgcgccatctcctgcggcgtgcacaggctgatcgccagcccgctcatgccggcgcggccggtgcggccgatacggtgcacatgcacttcgggatcgaacgccagttcgtagttaaccaccagctccagctctttgatgtccagcccgcgagcggcgacgtcggtcgccaccaacactcggcaactgcgattggcgaagcgcaccaacacctgatcgcggtcgcgctgctccagatcgccatgcagcgccagcgcgctgatgccgcgggcctccagggcctcaagcactgtctgacaatcgcgcttggtattgcaaaacaccacgcaggacgcgggttgatggtagcgaatggccgacaccaggagcgccggacgctgctcgcgcgtagtctcataaaagcgttgttcgatagcggtctgcgcttcgtcatcgtccacttcgacgctcagcggctgacgctgaacacgctcgctgatgcgttcgatgcccgccggataagtggcggaaaacaacagcgtctgacgctgcggcggcgtgtagctgatcacatcgtcgatatcgtcggcgaaacccatatccaacatgcggtcggcctcatccagcaccaacaccttcagctcgtccagcagcagcgttttcttgcgcagatgctcctgaatgcgccccggcgtccccaccacgatgtgtggcgcgtgcaccagcgagtcgagctgcggccccatcggttggccaccgcacagcgtcagaattttgatgttttgcgtgaaacgcgccaggcgacgcagctctttgcttacctgatcggccaactcgcgggtgggacagagcaccagcgcctgcgtggcaacctgagtaacgacgatgttattcagcaagccaatgccgaaggccgccgttttgccgctgccggttttcgccttggcgcgcacgtctcgcccttgcaggatagcgggcaacgcggcggcctgcaccggcgtcattttggcgtaccccagttcgttgaggttggccaactgttcggctggcagaggcagggaagaaaaagaaactgtgctcacggcgataactcttatatgacgaatggaatggcggcgcgcccgcaggttggcgccgaatcagcggtaaatgataacagagatgggcggcgttacgggcagcgggcataaaaaaacccgccggcggcgggtttcttggcagctcagtcgttaaatcgcaacgacgttggctgcagctgggccacgttggctgtcctggatggagaattcaacctgctggccttcagccagggtcttgaaaccatcgctaacgatagcggaaaaatgaacgaaaacgtctttagagccgtcggcaggcgtgatgaagccgaaacctttgctttcgttgaaccatttaacgtgaccagtgatcttgctcatttgtgtttcctttacttgataaacctgccttgacggcacgagacgcgaaaaccttgctatatataggccttctttcgccgtcgcttattaacgcacaatcgcccaggcagggcaaatatttctgcttgttataaaaacagtaagttagcaacaaacctggcgcggtggctgtgaacgcaatcgttttcgtatatactgcccgccgatcatcaatccgcttactttcaccgatccaggtacgaaactatgttaacgattggaaccgccctgcgcccttccgccacccgcgttatgttgctcggctccggggagctgggtaaagaagtcgccattgaatgccagcgcctcggtctggaagtgatcgccgtcgatcgctatgccgacgcccccgccatgcatgtggcgcaccgcagtcacgtcatcaatatgctggacggcgacgcgttgaaagccgttatcgaacaagagcggccggactatatcgttcccgaaatcgaagcgatcgccaccgccatgctggtggaacttgaacgtcagggccaccgcgtggtgccctgcgccgaagccacgcgcctgaccatgaaccgcgaaggcatccgccgtctggcggcggaagaacttggcctgcccacctccagctatcgctttgccgacagcgaagcggctttccggcaggcggtcgagcacatcggctacccgtgcatcgtcaaaccggtgatgagttcttccggcaaagggcaaagcctgatccgcgcgcctgagcagctgcaaagcgcctgggattacgcgcaacagggtggacgcgccggcggcggccgggtgatcgtcgaagggttggtaagatttgattttgaaattacgttgctgaccatcagcgccgtggacggcgtacatttctgcgagccgatcggccatcgtcaggaagacggagattatcgcgaatcctggcaaccgcagcgcatgtcagccacggcgttgagccgtgctcaggctatcgcggagaaggtggtgaaagccctgggcggattcggcctgttcggcgtggagctgttcgtctgcggcgacgatgtgatcttcagcgaagtgtctccgcggccgcacgataccggcatggttacgttgatctcacaggatctgtccgagttcgccctgcacgttcgcgcgtttctcgggttgccgattggcgccatccgccagttcggcccttccgcttcggcggtgatcctgccgcagctcaccagcagcgatgtgcgtttcagcggactggaaaatgcgctgcacgggcacaaccagctgcgcctgttcggcaaaccggagatcgccgggcaacgtcgtttgggcgtagcgctggcgacggccaacacgacggaactggcggtggagcaagcgaaacaagccgccaccgccgtgacggtcaacggctgatactcacggggccgcttgcgcggccccgataacgtcaatagtcttcgtcttcttcagcatcgtcatcccgcgacgcctccggtgcggcctcatgttgctcgtcttcgtcatcgaacaataccgcaacctgagcaccctgatgcttctcgcgaatttcctgcgcaacgcgagcaatggcctcaccgctgctcatgccctgctccatcagttgatggatgcgatccgccgcttcctgctgctccgcgtgattcagtaatggcatacctgcatgcatgtgtcgttctctccggcaaaagggagaaggagtatacgcgctaacgcggcggatcccaacgtctggtgcgtcaggccggttgcgaacagccgttatcgttgcgccactgcttcaggcgatgccgccacagcatgacatgccacccctgcttcaggccgcgcgcattggcgaacatcgctctgtcgataccgcgctgatagaactcttcggtgatctgactctgagcggccggttccggctcgcgacgaatgctgtggcaaatgcccagcgcttcgcgggtgatttgccaatggaaagccggacgaatgacgatagtgcccgcatagcgctggttgagccgctccagcatgtcgacgattttcatatagtggcgttgatactccacgttcgccttaccgatgcgacgacgattactgatcgacttgtcgtgcacccgttgacggtacagcggcgtacttaaatatttgacccgtttggcattaaacatgacttctgtcgtccagggaatatcctggtgatgtaaccccggctcgaaataaagccgatgctggcgaataaagtcgaggcgatatattgccagccatacaacgtgaataaactttcgcgatttcagcgcacgttcaaaccactgcacgccactgatcacatcggtggtacgcaaacgcgcctcgggaaaaatcggctgcaattcatcttggctggtgaaatagcgctcgccattacattgcatcacgtctaattggtgtttttccgcctgttccagcagcgtggaatacatctccggcgccagcaagtcgtcggcatcgggaaacgccacatatttgccttgggcaacggcaagcccggcattacgcgcgttagaaacaccggcattggcctgatcgatcacacgaatatgcggatgtaccgccgcgtaacggtgcgcgatctctcctgaaccgtcagtggaaccatcgttgacgatgatcacctccaaccgttgctcgcgctgggccagcagcgaggccaggaaaggctccaataattcccccgcattgtgcatcgggacgatcacgctcagcattaacgacatagtcagctcttcaatgataatgtaacaaaataataattttatttttctaaaagactcattcggcctgcgtaggcttgggataggcgtgaaacactgcaaattcccgcgctggctaatggaaccgaactggcctttctttctcaaacccgcgccagaaaagcgctgagtaattaagccattaattctaaaaggcggcgacgttgctaaaatcgggcatagcaacatctcccccgcttctaataacaagcagaaataataaatttatgaaattaacgaatctttttttatatttctcgggtattgcgccctcgatgaataggcttccagtgcatttgacgttaaatttttaacatatcgaagtataatcaatggcgcaaaaaatgccttatttaaggtttgttgagctgctgtttatgtgaactgtgcttcatgtcgtgcatggcaaaacatgcatgacgtggctgtctatggcacactagccgccagatatcgccgtcctcacagccaggtttattgacgttcatgagcgtaaccgccccaaacataaaatctttgccctacagccgccgtgccctgatgacgcttttcgccccgctttcatcgcagccttgggcgatgctgctgcattcgggctttgccgaccattcgcacaaccgcttcgatatcctggtcgcacaaccgcgcgtgacactcaccacccggggtgccgacacgcaaatcaaaagtgacggcgtcaccattcagtcgcaggaagatccgttctccttgctgcagcagcaactggcggcgcaaggctggcagccggcgtttaatccggacctgccgtttcagggcggagctctgggactgttcggctacgatcttgggcgccgggtggaaaccctgccgcagttggccgaagccgacctcgctttgccggatatggcagtgggcatttatgactgggcagcgatcgccgaccaccaattgcaaaccctgacgctgctcagctatggcgatgtggagcagcgctggcgctggctcaatagccaaaccgcacctacagaacgccctttcacgctgctgagcgactggcgcgccaatatgagccggcgacaatacggcgagaaattccaacgtattcagcactacctgcgcagcggcgactgttaccaaattaatctggcacaacgattctccgccgactatcagggggatgaatggcaggcgttctgccgcctgagcgcctgcaaccgcgcgccgttctcggccttcctgcgcttgccgcacaacagcgtactgagcgtctctcccgagcgcttcctgtggctggagcagcagcgtatccaaacccgcccgatcaagggcacgctgccgcggctggcggacgcggaacaggacgccgcgcaggctcgccgtttggccgattcacccaaggatcgcgctgaaaatctgatgatcgtcgatctgctgcgcaacgatatcggccgcgtcgcccagcctggcagcgtacgggtgccggaactgttcgccgtggagccgttccccgccgtgcatcacctggtgagcaccatcaccgcgaccctgccaaaccatacctcggcggccgaactgctgcgtgcctgcttccccggcggttcgatcaccggcgcgcccaaggtgcgcgcgatggaaatcatcgaagagttggagccgcagcgccgcaatgcctattgcggcagcatcggttacctgagcgcctgcggcaccatggacaccaatatcaccattcgcacgctcgtcaccgaaaacggtcgcatccactgctccgccggcggcggcatcgtggcggacagccaggagcaggcggaataccaggagaccttcgacaaggtcggccgcattttgccgcagctaggggagtatgccctgtcgtgatcccatcgaactcaccggcctcactgcacgcctttatcagccgttttcaactgcagctgccacaggcgacgcagatttcgcaccatgtgcgcccggcggcggtgctgatcccgatcgtctgccgcgccgagccgacgctgctgttgacccgccgtgccgactcgctgcgcaaacatgccggtcaagtggccttccccggcggcaaaaccgacgccgaagacggatcggcgatcgtcacggcgctgcgagaagcgcaggaagaagtggcgataccgccgcaagcggtgactgtcctcggccaaatggcgccgctcgacagcagcaccggatttcaggttacccctatcgtcggcctcatcccgccggacgtgcagttccacgccaatgaaggcgaagtggcggacgtgttcgagatgcccctgcgggaagcgctgaccctgtcgcgttactatccgctggatattcatcgcgccggccatacgcaccgcatctacctctcctggtatcacagccagtttatctgggggctgaccgccgctatcattcggcgcctggcgcaacaggtcagtatttagcccgcattacgtgatctgactcgcaatctggcacggttgccgacctccgcggcgggtaaagcgatcgctatcacttcatttgatcgctttttcaactaccgttccgtttgaatggttttaaaaaaactgtaaaccctctcttaaaccttacgaaatacctgtaaaataccaccgtccgagataaaccactgtagaaacagggattaagccggcggcgttcagcacggaaagctggcgcgattaccgctaatggagcttgggcgaaagcggataccccgcacaagggttcgtcccgggtaatcagtaaaaaaagcgacaccacggattatttaatttcatgcgaaaaaggcagccgaacccgcacggcccttttacaatatcgctgttccctgcgcggtttttgaccgccgcagccataacaatacgtctctttaaggagttttagcgtgattagcgttttcgacatgtttaagatcggcatcggcccgtccagctctcatacggttggaccgatgaaagccggcaaacagtttgtcgacgatctggtaaataaaggcctgatgccttctatcacgcgtgttgccgtagacgtttacggctcactctcattgaccggcaaaggtcaccataccgatatcgccatcattctcggcctggccggcaacatgccggacaccgtcgatatcgatagcattccgggttttattcgcgatgtagaacaacgtcaacgcctgatgctggccaacggcctgcatgaagtcgatttcccacgcgacggcggcatggtcttccgcagcgacaacctgccgctgcacgaaaacggcatgcagatccacgccttcgccggcgataaagaagtgtacagcaagacctattactctatcggcggcggtttcatcgtcgacgaggagaatttcggcaaggccgccgagcaagaactgcaaatgccatatccgttcaactccgcgcgcgaaatgctcgaccactgccgcgagaccggcctgtcgctgtccggcatggtgatgcagaacgaactggcgctgcacagtaagcaagagatcgagacctacttcggcaacgtctggcaaaccatgcgcgcctgtatcgaccgcggtctgaacaccgaaggcgtactgccggggccgctgcgcgtaccgcgccgggcctccgcgctgcgacgcatgctggtggcgtcggacaaactgtccagcgatccgatgaacgtgatcgactgggtcaacatgttcgcgctggcggttaacgaagaaaacgccgccggcggccgcgtggtcactgcgccgaccaacggcgcctgcggcatcgtgcctgcggtgctggcttactacgatcacttcatcgagtccgtcagcccggatatctacatccgctactttatggcggcgggtgcgatcggcgcgttgtacaagatgaacgcctccatctccggcgccgaagtcggttgccagggtgaagtcggcgttgcctgctccatggcggcggccggtctggccgaactgctgggcggcagccctgagcaggtctgtgtggcggcggagatcggcatggaacacaacctgggtctgacctgtgacccggtcgccggccaggtgcaggtgccgtgcatcgagcgcaacgccatcgcctcggtcaaggcgatcaacgccgcccgcatggccctgcgccgcaccagcgagccgcgcgtttcgctggataaggtgatcgagaccatgtacgaaaccggcaaagacatgaacgccaagtaccgcgaaacgtcacgcggcggcctggcaatcaaggtgcaatgcgactgacagacaaccccgccacccggcggggttttttatgggtaatcaattcactggccgctttttgtgacaatgtcaccagaaaaaatcctgcatttctctcatcgatccggtggttagcctgcaaattgaccttctgttttgccaaatcgaaataatttactgagttaccatcaatcttgtataacctcaggctagaattagccgagcgcaacttaaggatctatgacctgaccgtgactcggggctggattaccgaacaaggatttaccggatgttgatgacccacctcgccgcgtcccgatatcgttattaccgttggctgctggccggagcggtgggcgcggctattctgttggtatcgctgtatacccgttactatcaagaggtcaaaagtatcgagctgagccaacagacattggccacccgcaccgtcggcaagctcaaccagttgttgacgccggctcagctgcaggcggagcgcagcatggacatgctggaccagccctgcgagaacgtttcgtcgaccctgcgctttcgcgccgcgcagaatcaggcgctacgcgccatgttgctggtaaaaaacggcattatttactgctccagcctgtttggttcccgtcattatcagctggccgcggtaatgccgaccttcgtcaacagcagcgccaggctggcgctgcgcccctcgctggcggtgagcaaaggcctgcccacgctggtgatgtggacgccatccccccacgataaaaccagcggcgtgctgcacgtgtttaatatcgagctgctgtccaactttttactcgagccgcaggagccttacgttcagcgcgtggtgctgaacgtggctgacagcagcctggaatacggccgacgcgaaatcctgagccgtgacaccctgaccaacgatctgcgctacaccgccggctctgcgctatacccgttctcgatttcgctgttcggcccgcagatcggcatgctggcgctttccgcactgccgcgccatatcccgctggcgctgctgatcagcctgttggccgcctatgtggtctatctgctcaccgctaaccgcatgagcctgtcttatcacatcggccatgccatcacccatcgcgagttccgcgtctattgccagcccatcatccatagcgacaccgggcgctgcgccggcgtcgagatgctgctgcgctggaaaaagaagcggcaagggtggatctcccccgacgtgtttattccgctggccgagcagcatgagctgatcattccgctgacccgttatctgatgaacaccgtgacggaaaatctgcagctgttcccgccgcgaccgtcgttctacatcagcatcaacgtcgccgccgaacactttaaaacgctcaacatcatcgacgatatccgccggatttggctgccggcgcatccgatgccgtcactgatgctggagctgaccgaacgcaccgcgctgtcggcgatccagcatgaccagatccggacgctgaaagacatggggatcatgctggccatcgacgatttcggcaccggccacagctcgctgagctacctgaagaaccttagcccggacgtgttaaagatcgaccgcgggtttaccgcggccatcggtaccgacgcggtcaacgccacggtgaccgataccatcattacgctggcgcagcggctgaagctgaagctggtggctgaaggggtagaaacggcggaacaggccgactatctgcgctcgcgtgaggtcaatgccctgcaggggtattatttcgccaagccgatgccgatccacgttttcccgctgtggttgcagcagtacgaatcgcgcgtcaggaaaacagaagagaatacgccggaggcctgagcctccggcgggtgggttacgaatgcgccggttcgtcgaagacgacgcgggtgacacgcaccaactcaatgcgatagtcggagacctcgacgatatcgaaacgcaggtggttcagttcaatggtgtcccccaccaccggcatctggccgtagtgggctaacagcagccccgccagagtggcgtagtctgcggttgggctgaccaggtcatcgcaggccagcgcctgttccagcgagtgcaggtcggtcccgcctttgaccagccagccgtcgccttccgccacgatgtccggcgtttcatcttcgtccgggaactcgccggcaatcgcttccagcacatccagcggcgtcaccagcccctgcaccacgccgaactcgttggtgaccaccaccaggcgccctttggcgcggcgcagcaccgccagcagcttgatgacatccatggtttccggcaccacgatcggcggcgtgcgggcggcaaactcggcgatatcttccccttgctccagcgccaccagcagatccttggcgcgtaccacgccgacgatctcatccacagagtcgcgacacaccgggaacaggctgtgcggcgtatccagcaactgtgcgcgcacctcctcacgggagcgctcgcagtcgacccaggagatgtcagtgcgcggcgtcatcacgctgcgcaatgagcgcgaggccagcgtcagcacaccgctgatcatataacgctcttccgccgcaaaggtttcatccctcggcaacgccaccgcgtcgtcaggctgctgtgcgcgctgctgccccatcaggcgcatgatcgcttccgcggtgcgctcgcgcatcgggcgacgcgcctgatgcttgataaagttgcggcgcgcgatctggttgaacaattcaatcaggatcgagaagccgatcgcggcgtacagatagcctttaggaatatgcaagccgaagccttcggcgatcaagctcagaccgatcatcaacaggaagctcaggcacagcaccacaatggtcgggtgcgcgttgacgaagttggtcaacggcttggatgccagcagcatcaccgccatcgcgatcaccaccgccgccatcatcaccggcagatcgttcaccatgcccacggcggtgatcaccgcatcaagcgagaacaccgcgtcaaggatcacgatttgcaccaccaccgcccagaacttggcgtaaccgcggttggcgccatcctggtgcgtctgcccttccagccgttcatgcagctccatggtggccttgaacagcaggaataccccgccgaacagcaggataagatcgcggccggagaagctgaaatcgccgacgctgaacagcggcgtggtcagggttaccatccaggagataacagacagcaggcccaaacgcatcagcaatgccagcgacaggccgatgatgcgcgccttatcgcgctgcttaggcggcagtttgtcggccaaaatggcgatgaataccaggttgtcgatgcccagcacgatttccagcaccaccagcgtaagcaaccccgcccaaatagaggggtccattaaaaattccatatcagactccagagaaaagtgggaatgagcgcacgccgctcagacgtgacgatgccgccgctgcatgggcgcagtcgacaatagcaaagtgacgggatgggattaccgggagatggccgaagggccgaacaacatatgcaacgccagcaggtggcgggtgaaacctggaaaaacagttacttcggtgacagtccatagggagggctgaggcccttcactccttagtgatgaaagaggaaattactgtatcaggatttttctgggggacaaagcggctttttcaacggcggtttagggtgacgccacgccatatcgtctgcgacagctaagatttctccgagcattcaatagcggagcagcgtcacaaaaaatattttttcactcactaaaataaatctcgcgttcgtgaagtatcacgcacaggcatttgatactgcgtgagaaatgttaggcgtgcgtttctttttttctaccataatgtatctgaaccgcggaagtgactgccaagacggcgcggagaaacgacacaaaccgcgtctggagttcaacgaggaggtagcgagtggcaatagctattatcatcggcacacacggggctgcagcggaacaactgctgaaaacggcggagatgctattgggcgagcaggacaacgtcgcctttatagacttcgttcccggtgagaatgccgaaacgttaatcgtcaaatacaacgaaaaaatcagtggattggataccagcggcggcgtgctgttcctggtggatacctggggcggcagcccgttcaacgccgccagccgcattgcggtcgacaaagaaaactatgaggtcgtcaccggggtcaacatcccgatgctggtggaaaccttcatggcgcgggacgacaaccccgctttcgatgaactggtggcgctggcgttggaaaccggccgcgaaggcgtgaaagcgctgaaaaaaccgcaggaagaacccgcaaaacccgcggcgcccgtcgccaaagccgctgcccctcaggcgccgctggggccgaacgaccacatgaaaatcggcctggcgcgcatcgatgaccgcttgattcacggccaggtggctacccgctggaccaaagagaccaacgtcagccgcatcatcgtcgtcagcgacgaagtcgctgccgaccatgtgcgcaaaaccctgctgacccaggtcgccccgccgggcgtcaccgcccacgtggtggacgtggcgaaggctatccgcgtctggaacaacccgaaatacgccaacgaccgcgtgatgctgctgtttaccaatccgaccgacgtctggcgtctggtggagggcggtgtggatattcaatccgtcaatatcggcggcatggcgttccgccaggggaaaacccaggtgaacaacgccgtttccgtcgatgaaaaagatatcgaagcgtttaagaaactgaacgatcgcggtatcgagctggaggtgcgtaaggtctcgtccgacagccggctaaaaatgatggacctgattaacaaactcaattagtggcgcctgccgctgattattttactcagagcttttttggtcataggagaagtgcaatggagatcaccactcttcagattgtgctgatatttatcgttgcctgtatcgccgggatgggttccgtcctcgacgagttccagttccaccgtccgctggtcgcctgtaccctgatcggcttcatcctcggcgatatgaaaaccggcatcattatcggcggtacgctggaaatgatcgccctcggctggatgaacatcggtgcggcggtcgcgccggatgccgccctggcgtccatcatctcgaccatcctggtcatcgccggcgggcaaagcgtcggcgccggtatcgccctggccattccgctggcggcggccggccaggtgttaaccatcatcgtgcgaaccctcaccgtggccttccagcacgcagcggacagtgcggcggagcgcggcagcctgcgcgccatcagctggatccatgtcggcgccctgctgctgcaggcgatgcgtatcgccatcccggcggtcatcgtcgccatctcggtgggcaccgccggggtgcacgccctgctcaactcgatcccggaagtggtcaccagcggcctgaacatcgccggcggcatgatcgtggtggtcggttacgcgatggtgattaacatgatgcgcgccggctacctgatgccgttcttctatctcggtttcgttaccgccgccttcaccaacttcaacctggtggcgctcggcgtcatcggcgtggtgatggccgtgctgtatatccagctcagcccgaaatacaacaagtctcaggttgtccaggccggcccggctaacgcgaacgatctcgataacgaactcgactaggaataggtgagagaaatggttgatacaactgctcaaaagaaactcacgccggccgatattcgcggcgtattcctgcgttcgaacctgttccagggttcatggaacttcgaacgcatgcaggcgctgggtttttgcttctcgatggtgccggtgatccgtcgcctgtatccggaaaacaatgacgatcgcaaacaggcgatcaagcgtcacctggagttcttcaacacccacccttacgtggcggcaccggtactcggcgtgaccatggcgatggaagagcaacgcgccaacggcgcaccgatcgacgacgccgcaatcaacggcatcaaggttggtttgatggggccgctggcgggcgtcggtgacccgatcttctggggcaccgtgcggccggtattcgccgcgcttggggcgggcatcgccatgagcggcagcctgctcggaccgatcctgttcttcgtgctgttcaacctggtgcgcctgctgacccgctattacggcgtggcctacggttaccgtaaaggggtggacatcgtcaacgacatgggcggcggcttcctgcagaaactgacggaaggggcgtccattctcggcctgtttgtcatgggcgcgttggtcaacaagtggacgcacgtgaatatcccgctggtggtgtccaagatcaccgaccagaccggacataccaacgtcaccacggtgcagaccatcctcgaccagctgatgccgggcctggtgccgctgctgttgaccttcgcctgtatgtggctgctgcgtaaaaaagtcaatgcgctgtggatcatcatcggcttcttcgtcatcggtatctttggctattggattggcctgctgggcctgtaatcgttcgaaacggccggggggcaacccccggcttttttatgtgtggagcaagagatgtcactgaccgacgccgtactgatgctgtttatcgccctgctgttgctgtattcgctgtacgacgaattcggcatggatctgctgaaaggcaaaacgcggctcaaagtgccgctcaaacgccgcaaccgcctcgacagcctgattttcgtcggcctgatcgccattctgatttaccgtaacgtcaccgccaacggcgcgctattaaccacttatctgcttatttctttggcgctgctcgccatctatattgcttatatccgctcgcccaaaatggtgtttaaagcgcacggttttttcttcgccaatgtttttgtcgaatataaccgcattaaagccatgaatttatcggaggacggcattctggccatcgacctggagcagcgccggctgttggttcaggtgacgcacctggatgacctggagaagatatacaactttttcgttgataatcaataaataaagtgaaattaattttattctcgctcaaaccttgcgctgtctgtggataattaatcggcagcgccatttcatttctgactattatttctgcaacattgttacccgtgtctacattatattcccgcatgaactcagattaatgaaaacgagtctcaattaagaacaaaaatcgcgccagaataaagttgtcggtaccggaaataatatggtatggttgcgccgtcattggggagtagccggtttctggagaataaaacgccagaaacgcccgtatcaacatactcgtttcgccgtatgaaacgtggtgcgggcagccaggtaaggttggcgagaccatagacacgtaactccgtcgtttggttgggggtgggttacgtgtatatggagccacccggccgaggctatttcacatgaacctttcagcaacgcttattctcgctttcggcatgtccatggatgcgttcgccgcttctatcggcaaaggcgccagtctgcatcagccccgtttccgcgaagcgatccgcaccggcctaatcttcggcgtggtcgaagcaatcaccccgctcatcggttgggccatcggcctgttcgccagccaatacatcatggaatgggatcactgggtcgccttctcgctgctgttcattctcggcatgcgcatgattgtcgaaggggtgcgcaacaggcccgacgaagaagagaaggtcaaacgccacggcttctggatattggtggccaccgctatcgcgaccagcctggacgccatggcgatcggcgtcggtctggccttccttcaggtgaacatcgtgcacaccgcaatggccatcggctgcgccaccatgatcatggcaacgttgggcatgatgatcggccgctttatcggcccgctgctgggcaaacgcgccgaaatcctcggcggcgtggtgttgatcggcatcggcgtcaacatcctgctggagcacctcggctacctggcctgaggcgaccgaactgcaaaaaaaacctgccgcggcaggtttttttgtttctgagttccaggccccttaagcgcgacgtcggtacaacgccaacacgaaatccgtctcgcacacaaactcgccgccctcggccaaccgctgttgcacctccggcgtagcgcgccaggcgaacggcgtcatctgcagcagattggcggcctgcgcgcccggtagggtcatcgtataggccagcgcctctttgcgctcgcagtcgaatccgtcgaactgttcatcctgttcggcatgcagctgcacctgctggtacacctgctctttcagctggtacagatgacgcgggcccggcgaaaccgtcagcaccacgccgcccggtttcactacccgcgccagctcctccgccttgcaaggcgcataaatgcgcaagaccgcgtccagcgccccgtcggcgaacggcaaacggtgactggaggcgacgcagaacgagaccgccggataacgtttggcgccataacggatcgccaccttggcgacgtccagcccatagaccgccatattgcgctcctgagccagccgtgcggccacggcggcggtgtagtacccttccccacagcctatgtccaataacgcgcctgcatcggccgccagcgccgaatccagccactcggctacctgcgcttgcaacggctgataatatccaccgtcgagaaacgcgcgccgtgcctgcatcatttccgcgctgtctcccggctgcttcgatcgtttgtgctgcaccggcagcagattcacgtaaccttctttggcttgatcgaactgatgattgccgtcacaacgccagtgttgtgatgaaaaatgcagcggttgatgacacagggggcagtgataagacatgaatgggcttccagaaagacagggcgcggctagtctaaagaaggcgtcggcttgatgcaaggcgcatccccgctcgctttcgccgccaacaacatctggtcaagcggggaaaaagctggctacactgagagtctgttttctcatgcaggtgaacataacttatgagcgatcgttccgcgctgctcgatgcggtgccccacattcagcacggcttcggcagcaaactcgcgctgctgcccgggcatctgctgccctacagcgccacgctgccggaaaaaaaacaggtgcacggcacccgcatcgtcgatgtgctgcagccggcgcaggcatgcggcgaggccgacggtttctatactcgccagcccggcattctgctcagcgtactgacggcggactgtttgccggtgctgttcagccgccgtgacggcggcgccatcgctgcggtgcacgccggctggcgcgggctgctggacggcattctggaacagatggcagcacgcattcgccaggacggcgacaccgccgattgggtcgtctccatcggccctgccgccggctcgtgctgctacgaagtcgatgaagcgctggtggagagttttaaacagcgcctgccgctgcccgccacgctgatcagcccgcattaccggcatctcgatttggccgcaattgccgaatacaagctggcggcgctcggcttcgccgccgttgaccgcgccggcagttgcaccatctgcacgccggacgtcgacccacagcggccgcagcgcttcaaatacaccagctatcgccgcaacagccaccggcgcgcgcaggatccgacgcatccggggatcaaaggccgcaaccagtacgccggcatcatcatcgccgccggatgacggaaacgaaaaagcccgcgcgaaggcgggctttttgtacagctgacgctgattagatagcagtaacgtttactgcagatgggcctttctggccatcttggatttcgaactcaacgttctggccttcagccagggttttgaagccgttaccctggattgcagagaagtgtacgaacacgtctttgctgccgtcagccggggtgatgaaaccgaaacctttagactcgttgaaccacttaacttgacctttgatctttgccatcttgagtatttcctttggattgtttaaaccgcccgagggcgttacatagacaaactagagtcgttactgcttgaggcactaagataaggatcggcagagaagcggtattcaacgctaacgtctttactcagaacttctttactgaaaatgccacacatatacagaactgtacctcgttttacccagatgcgttatcacatactctgtatgcgatggcaagccatttttaatcactgaacgacatgtcgcacatatttgaaacggtcgagcgcaacatttgcttaaataggccaaaagatgttgaagcatcggctattttctgcttgccaaaatcactgtgccagaccccgcattctgctggagttttaacaaaactttcatcgtattgacgcctttgcgtctcatcatttccgcttttttgccgcttatagcgttaaaaaatttgaatctttatggaatttgatatgcaacatctgaatatcgatgaacgggggccaatttattcatcgctcctccgaccatttaccgccggaaagcccattcatcatcggctttccgccctgccgccaaacggcgcgggcgagaacggcgcacgggtcggcggcaacgtctccaccctgcacaacggatgcataagcatgcaaagcgccggcacatcttccgctgcctgtggtttcatcataaataatccgaatgtcattaacctcaatagccggaataatcttatcaataacgaaagttcaacgttgaattaaatcctgaaaatacgggggttatttgaatcaccacccgcacttatcaattctgctaattacagctgcgctttcaaaccattgactttattcatcccgctgcgccgccgggtgattaggtaacgcaggcgatgagccctgcaacgcgatgcgctcgccaatcttcagcgggaggaattgatgctgctccaaccccgcctcgctcagggccaggttcagctgctgcggcggttcgtccagcgattcatccgccagttcgaatactccccaatggataggaatggctcgcggctgattcagttcgcgatacagcgccaccgactgctgcggatccatatgctgctcctgcataaaccagcgcggcgcataggcgccgatcggcaacgcagccacgtcgaacggccccagccgttgaccgatctccgccagccgttccgaataaccgctgtcgccggaaaaataaaaccgtagcgccggatggtggattacccacccgcaccacagcgagcgattgcgatcccacagcgtgcgcatgctccagtgccgcgccggcgtggcgtagaccgtcagctcgcccagtgacaggctctgccaccagtccagttcatgcaccttcagccggtagcggcgaaaccagcgcttcaaccccaacggcacgatgaactcggcctgtgggaaacgccgcgccaattgccgcaccgtgcgcctgtcgaggtggtcataatggttatgggagatcagcaccacatccaccgccggcagttgccccaccgtcaacggcggcggcgttctgcgctttgggccgtaaaagctcagcggcgatgcacgttcggacaataccggatcgatcaggatatagcggccactcaatcgcaatagcatcgaggcatgccccaaccaccagacgctgtcgtcgctgccactgagatcggcaggttgccaccagcgctgggtaaattgcgcataaccctgctgcggcggcctgggcagcccctgtcgcttgcgttcatcttgccaacgccgaagatcgccctcctgacgccgcgaaggttccaggttgcgaaatccctccggcgtatgatgcgccttggccgcgtcgtaataacggttgattcttttcatcctgccttttctcccgaccacagcgccctgcacgggcatgactttcagtgtaacaaacccgatgaagctcgcactttgtcagccgtgcgctgcatctcgggaccttttgccgtatgctgttgtctcactccagtggaaagccagggccgccaagagcccgttaagactctcttaagatctttgtgattgacttgtagggcatacagaaaaggagaagttatgagtcgttctacatcccgcaaatcaggcatcggcctggggcgtcgtattcgcagcgcgctgctcgcgcagaagcaatactggaaaatgtatttcgccatgaagctgcgccggctgcgcgtgcctgcaccgttggtgctgctgggcggttcgctgcttgggttcttcatgctgactctgctgatgctcagcgtagtcgccatcgacgtcatcagcaccctgctgctgctgtgccggaaactgctgggacggggtgacggtgaggggcgcgcctttatgccgcgcggctgacgagaagagcgcggaggcgcaatacgcctccgcgcgcagattaacgcttggcgcctttgcggcgcgtcagcatgaacccgccccacagcactgcaacccacaccggcatcaacagcaccgaaatgcggatcccttcgctgaaatacataatcaccaaaatcaggccgaggaacgccaggcacagatagttgccgaacggataccacagcgccttaaagctcggaatgacgccctgacggttcttggcggcacggaacttcaggtgcgccaggcagatcatcacccagttgatcaccaacgttgacaccaccagcgccatcagcagctcaaacgccttgccgggcatcaggtagttgatcagcacgccgattgaagtaatcaacgccgacagcgcgatggacagcaccggcacgccgcgtttattcacgcgcgtcagcacctgcggcgcattgccctggctggccagcccgaacagcatgcggctgttggcataaacgccgctgttgtaaaccgacagcgcggcggtcaagaccactacgttgagcaccgttgccaccagattgctgttcagcgcatggaagatcagcacgaacgggctgccgccctccaccacttgcccccacggatagagcgaaagcagcacggtcagcgagccgatatagaagatcaggatgcggtacaccacctgattggtggctttgggaatgctgcggcgcggatcggcggcttccgccgcggtgatgccgaccatctccagcccgccgaacgagaacatgatcaccgccatcgccattaccagcccggagaagccgtgcggcataaagccgccctgctgccagaggttggtgatgctggcctgcggcccgccgttaccgctggccaacagccaggcgccgaagacgatcatgccgacaatcgccactaccttgatgatggcgaaccagaactcggtttcgccgtacaggcgcacgttcaccaggttaatcaggttgatcagcacgaaaaacagcgcggcggaggcccaggtggggatctccggccaccagtactgaatgtagatgccgacggcggtcaattccgccatgccgaccagaatgaacattgcccagtagttccagccggaaaggaagccggcgaaatcgccccagtatttataggcaaagtgactgaaagagccggcgaccggctcctccaccaccatttcacccagctggcgcatgattaaaaacgcgataaaaccgccgatggcgtagcccagcagcacggcggggccggccattttaatggtttgcgcaatgccgagaaataaaccggtaccgatggcgcccccgagggcaataagctgtatgtgtctgttttttaaaccgcgttttagcggagtatcctgatgctgaccgcccatcttatcctcatatggcgtatacccttgccgctatcggccaagatttcaccaatcaataaatgtatctgcgggcggctttttaacacttaaccccgtgagcatcaaggagaagcgccccgagacggcaggccggagcgcgatttttttaccgcgagaaagcggataacggcagcgtttagccaggcataccgcacagtttggtcagattgcgcgcgccgatcatcagcgtggcgacataagattggctacgcgtgaccacttccaccgccacgcgatcgttttgatattttatcaggtaggtcgagggccagccctgacggcgctggccgaagctttcggcatgacgatcgatcgccgcatgggcaatcaccagatgagacaagtttttatcacctttgataatgcgcttcataaacagcctccgccaacgacagctctgttattagaaaaaggagaaactcttaccaatcaccggtattgttcgactcagttagcctgtcggctcatcaggaagcagatcatcgccgcgcgcagcggactggcgctgtccgcctgccattcaccgccctgagtgctcatgcgcgcctgccactgcgggctgtcgctttggttatcggggttcagactgattttgttggcgcaaatgatcggccaggcatcggagggattcttgcagtaatctttacctttcacaccaccgtagggataccacttgtccgggttctctccggtcagcagcgcaatgctgcggttcacttcggcatcgctttcttcgtaccatttaatcatcggcttcatccatctttcgtaaggttcgcgctacattacgatgcctgtacgacagttttatgacagcgccgccggttttcacattatctctactaatgctttgtcccctttatctttccttagcgtctgcgtaaacttttctccctgttcagcgcccggagaacgcatgcatgttgaccggccttaaccatctgacgctcgccgtcagcaatctcgatcgcagcttcgatttttatcggcatctgttgggatttatcccgcacgcccgctggcaaggcggcgcctatctgtcgttagggccgttgtggctatgcctgtcgctggatgaaacgcgcatgcaacaacgcgagcgcgattacacccattacgccttcagcgtcgcgccggaacacattgagcaggtcagcgagcggttgcgccaggccggcgtcgaagagtggaaaagcaatcgcagcgaaggcgaatcactctattttctcgatcccgatgggcatcaattggagatccatgccggcgatttggccagccgcctggcggcatgccgggaaaagccgtatcagggcatggtgttttactgaggcgccccggcgacgctgccgtcggccggggcatcatgctcaacgttcggggatgaaacctttgaaatccagcgcggggttgagatcgtcgtcagcagcagcggcgccgtctgcgccggcgcggtgcgccatacgcttcaacagcgccgtttgctggcgttgttgctcggcaatctcctgcagcaggcgaatctgctcattggcgcgcacgctggcgcggttcaccaggaaccagagccacagcccggccagcaacgccacggcggcgagggccagcgacaacaggccgttctggccaaaacctaaatcgtacatggacaaccctatctactgcgaaattcaggccgccatcttaacactcgcggcggccgtgcgaacatccctgccaaaaattgcttaccagggcacgaagcgggtcaccgaacagatgcccaacgcaaaatttccaccatcgtcgcaatagctgtccagcgccagcaggtagaaaaacaggcaggcagcgacggccgtcattatcacgaggattttttttcgcaacaaatttagcagcctcattgttatcttggtaatctatcgcgcatgttatcacagcgaagttaaacgaagtttaactttccgtttagatttctggctatcgcccggttttcagactgttacccttgccctcgcataggcgccgtggctagatgaaccctcagggataacgaggaaatacgatgagcaaattgattaggtgggtattggtgttggcggtcatttacggcggctttttgatctcgggctacggcgtgctgatcggcagcaacaaaaacgttggcgggttagggttgcagtgcaaatacctgacggcgcgcaacgtggcgatcgcccagtacgtgaatggcgacaacggtttcatcggcatagccgactgcccgctgttcaagaaaatcgaaacggtggtggattaaccgccaccgcccgacgccgccgctttgcggcggccccgcctcagttgcgggtaaacttcatctcgatcagcgcaatcgccttgtcaatcgctcggcgggtcaccggatcggcgccggcaggatgcgtggagaaatcgatgcttttgagctgacccgccatcttgtcgcgcacttcggtcggcgcaatcacgtcgataacgtccagaatctgtttgatgaccagttggcaagcgaccagatcggaagccagttcctgctcgttgctcagcatgtcagacataataaatttccttcttgattcaaacgccgcacagaatagcatggcgtccgcgccattgcccgcactccccgtctttttccccattctgcgcaccggcgggcaaaagcctgcggcggattggcctatacttgctgcatggcggtggtaaaaaccacccgcaagccacaaccaacaggagaaagttatggcgaatcacaatgtgaaatcctgggcgacagtgcgtgaaacttcggtggaaatcgccgaagccatttttgagctggcagggaacgatgaagtgttggcgcagaaaatctgggaagaaggcagtgatgaggcgttggaaaaggcctttgccaaaaccaccgccgaccagctttattggggagaggaaaccgtcgagcggaaaaacgtttgagcggttacgcaacaaaaagcccgggtttctgacccaggctttcccgattagcgctcgccccgcttagcggcgtgcatatcttcttgctctcacggttcttcacctcccacaccttccgcattcttcatgctcatcaccggcgtcgccataaaagcgccgacgcccacgattacaaccagagtaataatcactgtcattaacatgcgatcaccccatcaacgttgagttgttacggctgactctgttttggcggttcttgctgcggctttctttgcgtcccccaccgcggcggcgacagtctcagattagccgtttttcctttcggctgacaagcggcggtcaaacggtttttccgaataattgccccccgtcaccggcggcatttttgtcgacggcggcaagttgtgtatacttcaccgctatgtaggtctcacactgacgcactgatgatacaagaacaccacctctcgttggtctgcgccctcagcaaatgggtcgaaactcacctcggacgagtgatccatctcgaagagctggccgagtactccggctactcgctgtggcacatgcagaagctgttcaaagaagcgacagggatttcgctcggtaaatacattcgcgaacgccgtctggccggcgcggtctatcaactgcgcagcagtgaagcgtcgatcttcgacatcgccctggactttggcttcggttcacagtcccacttcacctacatgttcagaaagcgttttaatatcacaccctatgatttccgccaggatttgagcgttgatctgcacatcgatccgccgttgcacgtcattcaccaaaaatccgcctgaagcccgccgcaagtcggcgggttaacgcgccccccagaccgccagcatcgcgatcgcggccggcagcgcctgcacccacagaattttgcggctggcgctcaacccgccgaacaccccggccgccagcacgcacccgagcaagaacagctgcagtgccatatccccacgccagtagctccataccaaccccaacgccagaaagccgttgtacaacccctgattggcggccaacacccgcgtggctgcggcgaactccgccgttgtgccaaatgcgcgcctgccgaggggcgtacgccacaggaacatttccagcaccaggatataaagatggagcgctgcgatgagcagcagcaaaatatcggcaaagaatttcatgatggttccagtcgtttattgaagatgccatcaattataaacgccttcgctcacctccccatcggcggagataaaaaaacccgccgaagcgggtttatgcaggagtcattttttgaggttagtttaatacggcgaccaacaatgccgcgacagagacccaaaacagcgccgtggcaaccacgacatgggacaatcttgcacgataaagtacctggctcataatgacctcactgacatctgactaacgggagacaacctgacttcctgaggattatcctaaacttcttctcactgtcgttatatgcgccagatcacttttccgccgagaaaccttatattgtcgtaaagctggagccgcgatcacattaattacgccttattagagcgaaataagccgaataatcgcggcgattatatcctaacgctatcaaacatcgttccagggcaggcgcggtgcggtcatgcgctcaccagaataaccgctaaccggcgggaaacgcggcgcgccttgttcccaatcatgctgagcccgagtaatttcagccttggtatggccaacgaaattccaccagataaggatctcttcgtttaatggcgccccaccgatgagtaatccccggctccccttccgtgcatttaacccaatagagttattctttatgcccaaataggcgaattcatcaggtgaaaaggtttcaccattaagttcaaatgcaccaataaggggcaaaaagccgatttcataatcatcgcgcaacggcaattcgattcttgccgcttcttcccattccagatcaatggcgattaatggcgaaagagtgaacaccggtgaacaataagcgccaaattccccaaccaacaaacgatgattcacgccattattctgccactgcggcaaatcaggataatgatcgaagcgtggtgccatgtcggcatgttcggccggcagcgcgatccataattgcgcagcatgcaatcgccgttgctcacccaccgactgttccgtatgcgcaatgccgtgccctgcggtcatcaggttaacctgacccggacgaatcacctgctcactgccgaggctgtctcggtgcagcacctcaccttctatcatccaggtgaacgtttgcagcccggtgtgcggatgcggccccacatccatgccgggcgaagtgccgttgaataccgtcggcccggcgtgatcgagaaaacaccaggcgccgacggtgcgccgctcccgggttggcaacgcacggttgatcggaatgccccccacttcggcgttacgcacggcaatacgttgtatctggcgcacaccgtcaacgacggggcactcgcgtgaaggtgaagagagcgtaggacgtggctgactcatcgcaaagacctcctgaatggcgccgattcgccaagggtaaccgcccaagcttaacacaggacagctcctccgcagagcggcgacgtgcaggcacgttcgcgcggttcagggggctttgatatagcagctcttgatgtctatatcgtcatgcgcgtgcctgagatcggagaaataggtcacgccaaagagaattgataccaccagcagcacggacaccaacaggccgatgatcgccagcagtttggtttcatcatggagattaggctccattttatctcccctagttaatcgcgtcaggtcacccacagcgtgaccgccagcgtaaagataatcagtgagcaggacgccaccgccaatacgacgatcgcaaattgcgcatcacccaaggtttctcgatagtttttatccgttgaggcgttacgctcttgtttcactaaatcggttttcactcgttcaactgctgcattgctgtttgacggggcaaaacatcccctcagaataaggcgccaacgtcgctgacttggtcgctccggcctcaaccgggggatgacgctatcaattttccccatcagggtcaacaccgcgcctgccggcgagcgagcaagtacacaggggagatgtaactggcatggagagcgcaaggaaataagagacgccgattgcagagggcaaaaaaaaagcccggtacgtgaccgggccagggtagaccgacgcgttattgcgggatacgcaacacctgccccggataaatcttgtccgggctcgacagcatcggcttgttggcttcgaaaatcttgttgtacagattggcgttgccgtacatctctttagagatcgcgctcagcgtatcgcccttcttcacggtatagaagcggctctcggcgtcggattgcgctaccgccaccttgtcttccacaccgctgatacctgccacgttgccgatagccaccaggatcttctcttttaactcctggctgacggcgtcgccggtcactacggctttaccatcgaccacctgcacattcactttgtcggtgcccggcaggccgctcttatcgagatgctccttgagtttggcgctttgatcttcggcggaggcattgccggtgactgtatcccacagtttttcgcccgcttctttgacgaagttaaacaagcccatattcactccttttgatggttgcagtaatgcgtttaagtaaggcttgttaagcttagcatcgacaaaaggatatgccatccgctcacggcgtcagaaacgggtagagtattccgaaagtgtcgtcagcggcgtttccatggcgattaatcgtgcaatgatgctgaaaaatcgcgcttttctacctacactgttgcagacaaggcaactcgacgaaggaggcgtgcgacgatgtacgcattggtgatgtttgtctgttatctggatggcggctgcagtgaaatggtggtcaatatattgcgcgacgagccgcaatgcctggtcgcgatgaaggaacagaacttgcgacacgccggctgttatcccatggaagagtttatcgacggcttctggttgccagccagcgaatattcggatttttaacctgctccccgcgcaatgctgaggaatttctgatttcatcggaaacttcgtcttcctctgaggcataaggccgctgttttgctaaattgcggctcccgaagaagagagagacagagaaaggtcatgccagcatcggctcattccaacgagcaatatgaaactctgctgcgcgacgtcagcctggcgttaggcgacgcagtgttgcagttaatccaaaaacataaaaaggtatccggcggcaatattctttcacagctggtggacgaaatagaacgtgagcaggatcagcaacgtttcgtcgcactgcgttccgccattgaactggtcgggctggcgcccaaaggctgagatcccgataaaacaaaggcagggcttgcgccctgcctgattaccaatcccgacacaggatgaaggtaatgaaattgcagattagaaacgatacgtcaggctgacggcaacgatatcatcgttggccagtttcagtttgttatcgtcgctcagctggttgatttgataatcgacgtaggtgtacatatttttgttgaagtagtaagtcgcccccacttccacgtatttcaccaggtcggcatcaccgatcccttcgatatccttgcctttggactgcacgtaggccacggaaggacgcaggccgttctcgaattgatactgagccaccacttcgaagttttgcgttttattggcgaagccggaagtgccgttgacgctgatcggcgtcatgttacgggtttcggcatacatcgcagccaagtaaacctggttggcgtcgtatttcaccgcggtggtccaggcggtagcgctgtcacccttgccatactgcagcgctttctgagcgctggtgcggttggaatcggagaacgccgccgctacgccgatgccggaaccgccgatatcctggtagtccagagacaggccgtaaccgtcgccgttttgcttggtcacgctgcggccgtcaccgtcgtttttaccctgatactgcaccgccaggttcaggccttccaccaaaccgaagaaatcacggttgcggtaggtggccaaaccgttggaacgggcggtcataaagttatcggtatagctgtaggagtcgccgccgaattccggcagcatgtcggtgtaagcctcggcgtcatacaccacgccgtagttacggccgtagtcgaaagaaccgtagttgccgaatttcagccccgcgaagcccagacgcgttttggtgccggcggtgccctgcgcttcgtcgtgattggcctggacgttgtattcccactggccgtagccggtcaactggtcattgatttgcgtttcgcctttgaagcccagacgaacataggtcatatcaccgtcgttggacttactgtcgctgaaataatgcttggcgttaacgcggccgtacaggtcgagtttattgccatccttattgtagatttcagccgcgttggcgaaggaggtgatcgccccgagggcgacagctaaggctaatacactgcgtttcatcatttattttcctagatattataattagaaccctgcccgtcacgcccaatttataatttgggctgtgattttatcttttggtattttatgagctcccctaatgccggggtgatgtgacattagcatcatgaatcaaaacttaaaatcaaaaagttcatgaaacaacgaggagaaagcatgtttatgtgtaactaaatattacaaaaaagaaatcactcaacccattgaatataagaattttttatcacataagttataaccaaaacggtgcaatgcaccattatagtgcaatttagtttcgttttgcgtgctttctgcgcgattcaaaagtaacaacaagattagcatggttattaaaaacgttacttatttcacatttttatcttaacaaactcaccaggcaattaaggctttcagataacgacctgacactgccttctattcattcgtataaagacgcggattagtaacgaataaaattcgccttacgggaataaaaatagcgggaaatagcagattaaaataatgaaaggaataacggcggcgcgctgacggcgccaccgtggataaatcaatacagcgtagagcgggaaacttcgctcaacaacatgccggcacgcaggcccaacgccacgctggggttagggaacagtatccacgccccctcctggcccacgcgatagtcctcctgcggttgctcgcacagcaacatacccggttgcagttcggtgaagttggccgtgtcatcgtccagatgcagtttgaaatcttcgctgtgcttgatcaacgagtgcatcacacggaaaacccgaatctcggcgcccgcacgcgtcggcagcgccccttcgctgaccgccgcccgcagagcgcgatcgatggcggcaaactgctgcagatcgttgctgccgaacggccgcgccttgcccagctcgagcgtacagctcgccgcattgagatgttcgctggagtaatggctaaaagtcccgcccggcgcactgtgtaccaccaacgcatccagatcggcggcatccagcagcttcaacatcggctcactgtacgggcgtttctgaaagggcagaatgccgaaacgtggcaaacgcgattcacggatggcggtgtgcaaatcgtaatggaaacgcgccgcctgctccccatcgaaaaaggcggcgagcgcacgctccaactgctgcgcgcgcacggtttcgccgctggcggcgaagttgcggtagcggccgccgaacatgcggttcatatcgctgtgcagataacgcttgccggcccgcatcgccgccgggttgcccagcaccaccaacagtcgcaccgtcagcggcaaccggccggcaaggagatcgccgaccagctgattgagcagttcaatcggcgcggtttcattgccgtgcacgcccgccgacatcaccatcgcctggcggtaaggctgtcgtggcgtaagctccagcaccccttccccctgccagcgccaccgcagctgcggtgtttcaccttgccattcgacgggttcgttcccttccagcgtcaggggcagtagatcgatcatgctgcctcccttagcgttggaacggataaatggcgccgagaccgaggatcgacgtcagcgcatccagcgcctcgcgcccttcgcgcagcagcagcggatcggccaggtcatcctgcgtcaggcggtcgcggtaatgacgatcgacccactcgttcaacgttgcgaacagccgatcgttcatcatcacgcgcggattgaccgctctcaactcttgttcgttgagcgccacccgcaaccgcaggcaggcagggccgccgccgttgcgcatgctttcacgcaggtcgaacacgcggatttcatcgatagggccgccgctgccgaccatgtcgttgaggtaacgccacacgccggcgtgctgacgcgactcctccggcacgacgatcatcatcttgccgttcggtttggtaagaatttggctgttgaacagataggtcgccaccgcgtccgctaccgagacgcgctctgtcggcacttcgatcgccaccagctcgctgtccagcgtcgccatcttgcggcgcacttcatccagcgcctgttgctggcggtaaaacgcctgctgatgatggaacagcacgttctggttgctgaccgcaatcacgtcgttatgaaacacgccctgatcgatcaccgccgggttttgctgcacgaagaccgtatgctgttcatccaactggtgcaggcgagcgatcgcctcgccggcttcgcgcgtctggcgcgccggataacgcgccggcgccgtttcgccgccgaactcctgacgaccatagacgaacacctgcacgctgcgcctggcgtagtcgccgcccaaacggttatggttggccgccccttcgtcgccgaacaacgccacctgcggcagcgcctcgtggtgggcgaaatgccgatcgtcgctgaacatcgcccgcaatacggcggtggtggtttccgcttcgatggcgcggtggaatttgttgttcaggttggcggcggtgaagtgcaccttgccgtcggcgctgtccgccgaaggcgacacggtggccgcattggcggtccacatgcacgatgccgagctgagcgccgacagcaagcgcggcgactgacgcatcgcctgcgccagcaccgcctcatcgctgccgctgaaacccaggcgacgcagcatcggcaaatgcggccgctcctgcggcggcaagaccccttgctggaaaccgagatcggccagcgccttcattttcagcaaaccttgtttcgccgccagcttcgggttcgatacgctgttttgatgctgcgtcgacgcctcgttgccgaacgacagcccggcatagtggtgcgtcggccccaccaaaccgtcgaaattgacttcatatcctgacatgtttatcccctggggatagcgtgcggcagcgccatcgcgccgccgcagacgattaacggaacgacaggcccggcgagagcgtggccggcagcgacaggctttcgctttccagcgaagccatcggccaggcgcaatagtccgccgcatagaaggcgcttgggcgatggttgccggaggcccccacgccaccgaacggcgccgcgctggacgccccggtcagcggcttgttccagttgacgatgccggcgcgcgcttccagcaacagccgctcgaacagctcgcgctgcggcgagaccaatcccaccgacaggccgtagcgcgtctggttggcgagccgcagagcctcgtcgaaatcgcggtaacgcacgatggtggtcaacggcccgaagtactcttcgtccggcacgccggccacgccggtcagctcgatgatgcccgggctgagcagcgaactgcccggctccagcagacgcatggccagcagcgatttgccgcccaacgccagcaagcgctgctgcgctttcagcatgttttccgccgcggcagccgacaccaccccgcccataaacggctgcggttcggcatcccaacggccgacgcgcagttcgcccgccacctgaaccaaacgcgcgataaaggcatcgccttccgccccttgcttcaccagaatgcgacgcgaacaggtgcaacgttgaccggcggagataaatgccgactggatagccaggttgaccgccgcgtcgcgatcctcgaaaccgtcgacgatcagcgcattgttgccgcccatctccagcgccaggatcttctccggctgccccgccaattggcgatgcaggtgatagccggtgccggcgctgccggtaaacagcagaccgtcgatatccgcactggccgccaaggcttcgccggtttcgcggccgccttgcaccagattgatcaccccgtccggcagaccggcctgcagccaaagtttcagggtctcctcggcggtcaacggcgtcagctcgctcggcttgaataccacgcagttaccggccaacagcgccggcacgatatggccgttcggcagatggccggggaagttgtaaggcccgaataccgccagcacgccgtgcggacgatggcgcagcaccgaagcgccgtcggccatcgccgtctggctaaaaccggtgcgcgcctgataggcctgcagcgaaatgcccaccttgccgatcatcgcctgaatttcggtcagcgtttcccaacgcggcttgccggtctcgcggctgatggtttccgccagcgactgcttgtgttcctccagcaaggcggcgaagcgtttcaccagctgttcgcgctgctcgaacggcgtgcgcgcccaggcggggaacgcggcgcgcgcggcttcgcaggcagcggcgacgtcatcggcgtcggcggcgttagcgcgccacagcggctggttgccgaccggatcggccttgccgaactcggcgccgcggccctgccgccagacgccgttaatcaacagtgcaggatgggacatcatgctttctcctgtgcaataagggggagcacccgcaccgggctgccctgttcgacgcccagcgccgcggcggtggcggcgttgatatgcaggcggtcgtcatacagatcggcattgaccaacagtgcgcggtaattctgatagttgtcgttggccaccagatgcaccggcgcatcggcgcgcatcggcgtgtcatccagcaccactttcaccaggcggctctgcttcaccgcgcggatatggtcgatctccgcttccagcgtcgggccgccgtcgaagatatcgacgtagccctgataactcaggccttccgcctccagtaggcggcgcgccggcagggtttgcgggtgcacttcgccaatcactttctgcgcatcttcggccaggaaatcgacatacaacgggtgtttcggcatcagctcggcgataaacgccttttgcccggtgccactcaggtagtccgccttggcgaactcgatggagaagaaacggtgaccgacgctctcccagaacggcgaacggccgttttcatcggagaaaccgcgcatctcggcgatcagacgccgggagaagcgttcacggaacgcggcgataaacaggaaacgcaccttcgacagcagcttgccgttctcgccgtggcgataatccggatcgaggaacaacgtacacagctccgaatggccggtatggtcgttgctgaggaacagcgtcggcaccgatttatagacgttcagctgtttggaggcgtgcacctgcgtgccaacgcggaagctgtaccagggttccgccaggccgacggccacttcaattgcgcagacccccaccgcctgccggcgctcgctgtcttccaacacgaacaaataacactggtcactttgcggaagttcgccttgccaggtttttaacgcccgctcaatgcgcgccgacaaggtatcttcattctgcggcagtgaagtgagaccgatgccggatttaccggcaagcgtcagtaaatccgccagatcgcgacgctctatagggcgaataatcatcataatgcgaacctcttctgaatcaggctgcgccggtgaaggcgcagcccgctgattagctgcaaatgcgcgccacggcgcgcgcgaatcgcgccagcccctctttcacatcctgctcagggatgatcagcgacggcgtgaaacgcaccacgtccggaccggcgatcagcgcgataacgccttcttcgttggccagttgggtgatctgcttcgctttgccggcataatctttcttcaattggcagccgatcagcaaaccgccgccgcggatctcggcgaagatcgggtactgacggttgatatcgttcaacccgtcgatgaaccactggtgacgttgtttgacgccttccagcacttccggcgtgttgatgatggagaacacttcccccgccaccgccgtcgccagcgggttgccgccgtaggtggtgccgtgggtgccgacgcccagcgttttcgccagcgcatcggtggtcagcatcgcgccgatcgggaagccgccgcccagcgctttggcggtggtcagcacgtccggcaccacgccgtactgcatgtaggcatacagatggccggtgcggccgacgccggtctgcacttcgtcgaagatcagcagcgcgttatgacgatcgcacagttcacgcagcccctgcaggaaactggcctccgccggcagcacgccgccctcgccctgaataggctcgacgatcaccgcgcaggtgcgatcgttgataagctcggccgctgcggccagatcgttatacggcgtatgggtgatgccgcccggcagcggcgcaaaatcctgcgaatatttcggctggccgccggcggagacggtgaacagtgtgcggccgtggaacgcgttgttgaacgccacaatctgatctttaccggcgccgtgctggtcgtgcgcgtgtttacgcgccagtttcagcgccgcctcgttggcttctgcacccgaattacagaagaacaccttgtcggcgaacgtggcgtcgatcagttttttggccagacgcagtaccggttcgttggtatagccattgcccagatgccacagtttgcccgcctgttccaccagcgccgccttgaccgccgggtgcgcatggcccagcgcgttaaccgcgatgccgccggcgaaatcgatgtaagacttaccctgctgatcccacacctgcgatccttcgccacgcaccagaataaaatcggcaggggcataaaccgggaccatccagtcatcgaaagactgacgggtaactgcgattggctgttccatagtgacctcataatctcagcaaaggctgaattttgactgtaagggccgctcaagcccggttagaccgccacaatgcaaaaaaaccgttgttcaaaaccgactttcgcggcggagaaaatgctgtcccttaccgctgatttagaaacaaatctgttacataaaatcggtttttcactatttatggcgtatatccggtccctgagcgggaagtaaatgttaacgagcagttaaaatacatgtcgtttgataaagagtgtagagcagctatcgtgccaaaacgggatttttgccggattttgctattttttacgttaaaacaacggcttataatgaatatttattcattttctatgcattggtaatgcataaattaaaaaataaggcctaaaatcatcattgcgtgcgaaatcctattcaattacgaaaaacttcaggatttctgatcgggctcgcaaaaataatttcccccaatttgctcgctatcacactttttgcccccatcgggtgcagcggcgcgccagcatggtgcaacgcggcagcgacgcagaggcgccacccgccatactcgcgaaaaaggagccgcgctgaccgcggttcctgctttgtacgccagcgactacactgtgatcctgaccgccccttctcttctgcgcacaaggagccaccatgcccaagaaaaccgtcgatctcagccagccgcacgcccaacacgacatccgcgcgtttctcgacgcgctgaatgccggtggcggtaaacccatggagcagatgaagcccaaagaggcgcgcagagttttggaagcggcgcagcgcagcgtagacgtgccgctgcgcgaggtggagatcagcgagaaaaccatccacgttgagggccaggatattctgctgcagttggtgcggccggccagggtcaaagagaagctgccggtattcatgttctttcacggcggcggctgggtgctgggcgattttcccactcatgagcggctggtgcgcgatctggtttacagctccggcgcggcggcggtattcgtcaactacccacgctccccggaagcgcattatcctcaggcgatcaatctggcctacgccgccacggaatgggtggccgagtacggcgaaaaaatcaatgtcgatgggtcacggctggcggtggtcggcaacagcgtcggcggcaatatggcggcggtggtcagcctgatggccaaagagaaaggcataccggcgctgcgttgccagatcctgctgtggcccgtcacgcacgcccactttgataccgattcctatcatcagttcgccgaaggccatttcctgacccgcaacatgatgaagtggttttgggacagctatgcgcccgataaggcgcagcgcaaagagatctacgcctcgccgctcaacgccacgccggaacagctgcggggcttgccgccggcgctggtgcagaccgccgagctggacgtgttgcgcgatgagggggaagcttacgcgcgtctgcttgacgccgccggcgtcgaggtcaccgccacccgctacaacggcctgatccacgattacggcctgttgaatccgctcgcccacgtcccggcggtgcattcggcgatccaccaggccgggcgcgcgttgaagcactacctgtcctgacgctagccaaccacgtggcaagccacctgatggccgggcgccacgctgcgcagatgcggcgcctgttcacggcattgcgccgtggccagcggacagcggggatggaaacggcagccgcgcggcgggttggcgggattgggcgcttcgcccccggccacccacgccggcgaacggtgcgcatccagcgtcggcaccgccgccaacaaggcctgcgtgtagggatgcagcggttggcgaaacagcgaatcgcggtcggcgctctcgacgatctgccccagatacatcaccgccacgtcctggcacagatgctccaccacgccgagatcgtgcgaaataaacagcagcgtcaccccctgcctttcctgcaaatcggaaaacagattgatgatctgcgcctgaatcgacacgtcgagcgccgatatcggttcatcggcgacgataaattccggttgcaggatcagcgcgcgcgcgatgccgacgcgctgccgctggccgccggaaaactcatggggaaaccgcccgtaatgctgcggcgacagcccgcagatcgccagggtatcgagcacccgttcgcgcagttccgccttgcttgccaggccatgctgcaacagcgcttcgccgatggcgtcgcccacgcgcagacgcggattcagcgagctgtacggatcctgaaacaccagctgcattttcggccgcagggcgcgcagcgcgtctttgctgaggctatccagcgcctgccctttgaacatcacctcaccggcggttttatcgtgcaggccgagcagcgtgcggccgacggtggttttgccactgccggactcgcccaccagcccgaaaacgcggcccttgcgaatgctgaagctgacgtcgtccaccgccttcagttggccggtggttcgcccgaacagcccgtcgcgcagcgggaaatatttctttaatcctttcacttccaccaggggttcagtcgacatgcaggcgccctccggcgttgaggaagcaggcggattggcgctgcggtgtaccgtacaacggcgggatgccatcgcggcagcgcgcggtggcctgcgcgcagcgctcggcaaacgcacagtgttcaggcagccgcgccagatccggcacctggccgggaatggagtacaaacggcgacgccgctgccccggcaccggccgcgaggcgatcagcccctgagtataagggtgccgcggttcggccagcacttcccgcgtcgttccctgctcgacaacgcgcccggcgtacatcaccgccagccgatccgccatttgtgcgatcaccccaagatcgtgggtgatcaagatcatcgccatattgtgtcgccggctctgctcgcgcagcaacgccaggatttgcgcctgtaccgtgacgtcgagcgccgtggtcggttcatcggcgatcagcagcgccggccggcaccctatcgccatggcgatcatcacgcgctgcagcatgccgccggaaagctggtgcgggtagcagcgcatcagcgcctccgcgcgcgccaaccccacttcctccagcagttgcaccgcctgacgccaggccactttcggcgacagggccagatgacgaatcagcggctccagcagctgttcgccgagcgtcagcaccggattgagcgcgctcatcggctcctgaaagatcatcgccagccggttgccgcgcaaatcggccatctgcgccgcccgcagcgacagcaggttttgtccttcaaaacgaatctcgccgccgtctacctgcgccagcggctgcggcaacagccccatcagcgccatggcggtcacgcttttgccgcagcccgattcgccgacgatccccagcgtttgcccggcctgcagttccaagctgacctgctgcaccgcccgcaccggcccctgctcgccctgaaacgacaccgacagtcggtcgaacgccaccagcggttgactcatcgtgttactccattcattttcggatcgagcgcgtcccgcaggccgtcgcccaggatattgatcgccaccacggtgacgaagatcgccagcccgggcggcatccacagccagggccggcgctgaaagtcgatcaggctgttggcggcgtccatcatgttgccccacgacggcgtcggcgggaccacgcccagcccgaggtaactcagcgccgattcgctgagaatggcgttggccaccgccatggtggccaccaccaccagaatcggtacggtgttgggcagcagatggccgaagaggcgtcgccgggtggagagacccagcacctcggtggccagcatgaaatcccgctcgcgcagcgacaggatctggccgcgcaccagccgcgccaatgacggccagcccagcaggctcagcatgatcatcaccatgtagatgcggtagtccggcgacacgtcgagttcggtcagcatcgcgcccatgatgatcaacagcggcaggccgggaatggtcatcagcagatcggcgaagcgcatgatcagccggtccgccacgccgcccagataaccggaaagcgcccccagcacgtagcccagcgtcaccgacagcaacatcgacaccaggccgatggtcagcgatatccgccccgccagcagcagccgggtgcagatatcgcggccgagaaagtcggtgcccaaccagtgcgcgccgctcggcgcctgattgatattcagcacatcgccggcatcgtcgcgccacggcgacaacgacggcccaatcaggcacagcaacgccaacagcaccagcaacgccagcgaaatcatcgccggccggtggcgacgcagccgtcgccaggcctgcgccgcgggcggtggcgacagttgcgccagcgccggcagttgcgcctggcgccagcggcgacggcggccgaaaaacaacgtagccaacatcgtgttacctcaagcgaatgcgtggatcggcgtaggcgtacagaatgtccgccagcagattgccgagaatggtcaaggcggccagaaacagcgtgaaccccatcaataccgggtaatcacgcgccgccagcgaatcgatatggatgtgtccggcgcccggccagttgaagattttttcggtgatcagtgcgccggagaacaatcccggcagctcgaaccccagcagggtgatgatcggcaatagcgcattgcgcagcgcgtgtttgaggatcaccgttttctccctgagccctttggcgcgcgcggtgcgaatatagtccatgcggatcacctccagcatgctggcgcggaaatagcgcgtcaggctgccggcctgcagcatcaccagcgccagcaccggcaacagcaggtgcgccgccacctccagcgcccaggccagcccgctcgcctcgctgccggtgcgcagcatgccgcccgccggcagccagtgcagatcgacggcgaaccatttgatcagcaacaggcacaggaagaacgtcggaaacgacatggcggcgaacaccgccacggtgatcagatgatcgaacagcgaatagggtttcatcgccgagatcactcccaccgccagcgcgatgccccaatacaacaccatcgccaccgccgccagcaggaacgaattccagatgtattggttcagcagcgtgctgaccgggatctggtactgcagtgaaaagccgaggtcgccctgcagcagccggccaagccagtgcagatagcggctgaacaacggctgatccagcccgtacagcgcccgcagctcggcggcgcgttgcgcggtcagattgatgttgccgtcgataaaatcgccgggcgccagggcgaaaatgcaaaaaatcagcaaggaagccaacagcagcatcgggatcgtctgcagcagacggcgcaggataaaatttctcatcgcgggttccatcgccgccgcccggaatggcgcggcggcgtcagggcgttacggcgccggtttgacgttcggcaggctgccgaccaatccgttgtagatatccggtttaaagccggtgacgcgcgcgctgctggcgctcaaaatctcgcggttgccgagcaggatcaccggcggatcgtcggacagcgcctgatacagctggtggtacagcggcttgcgctgtgcgatatccagcgtggcgttggccctggcgatcagcgcatccacctgcgggttgtggtagccggtctcgctctcgcggctgatgaaatcgcgcacgccgtcgtgcggatcgttcagcgtgctggtgctgagggacgccaggtcgtaattgcccgccttgcgctgcgccagcagcgcgttgaaatccaatacctgcggtttcagcaccacgccgagccggcggtagttatccttggcgatcggcaccagcgcgtcgttgatcagctttttggtcaccagcagcgtcagctccagctttttaccgtctttctgccggatgccgtcagcgcccacctgccagcccgcctcgtccaacagctttttggccttatcgagatcgtaagcgtaaggattgatgccattcgcgtcataggcccaggagataggcgaaatcggctggttggcgaccttgccgtacccctggtacaccacggcgatcagcttttgccgatccaggccgtaaatcatcgcctggcgcacccgcttgtcctgcagcgccgggcgcttgaggttgaagtcgatgcggctgtaatcgctcgagctgtaaaggttgatattggcgaagccgagcagcttgagctgttcgatatcgtccggcttggcggtaaaggcgtcgtagtcggtctcaccggtctggaatagctggaagttggtggccgggttggtgacgcgatagataaagcgcgccatcggcggcgtaccgaggtagaagttcgggttggcgtggaagcggatctcctgccccggcacgtacttgtcgtaaatataggggccgttgccgagcggtttgccgttcaaggcgcgcacgccgtcgagcttgccccgctgatagtctttgccgtagtaagcccgcgacagcaccgggccgccgatcagttgcagtgtggtagcgcccggttgcgtggtgacgatctgaatggtgcgatcgtcgatcaccttcaggccgctgatgccggcggcggtgccgtttttatactcggcgccgccctgaatgtgcgccggcgtgatgtcagtgtcgccgtcataggccggatcgtgcaacagcgtcagggtaaaggcgatatcgtcggccttcagcggcgagccgtcgctgtagaccagattcggccgcagcttgatggtgtaggtcagattatcgggactgacctgccaggactccgccaggcgtccttccggcttgccctggctgtccaggccgatcaggcggctgaagatcacgtcggtgacgttctcgtcccagccgttggtgaacagatacgggttgaaaatcccctgcggttccgagatgcccgccaccacggtgtctttgcgcagcttggcggcggccggcacccggctgacgtcgctggccggcgtgatgccttcggccagcgtttccgcctgcgcgccggcgctcaatcccagcgcgcagatcaacgccagcggcgtcaaccgataacgcaacagtttgtttagcttgttttttattctactcacccactgcccctcgtctacccgttgataaaaatgtgacaaaatttatcgcagagtaatgggcggctggagggctgtctaacaacgaaaccggcattccattgccgaaaaaagcattatgaatttttcttgggcgaagcggcgtgaaaaacgcggctcaaccggccgccgccagcccccggataagtttggctaaggttttgatcgcctcttcaaagcggtcattccattcaaaagaggcgttgagacggaagcagtggttgaaatggtcgccggtggtgaacatgcgccccggcgcgatgctgataccccgggaaagggcccgccggtacaactccatcgacgacagcgccggatccagctccagccacaggaagtaaccgccgtcgggctggctgacctttaccgtcggcgggaaatggtgggcaatcgcctgacgcatcgcgctttggcgctgggccagcaggcggcgcaaccgccgcaggtgggtgtcgtagccgccgtgcagcagataatccgccagcgccatctgggtcggcacgctggtggaaacggtgctcatcagttgcaaacgctggatctgctgcgcataacgccccgccgccacccagccaacgcgaaagcccggcgccaggcatttggaaaacgacgagcagtgcaggatctggccgccgctgtcgagcgccttggccggcagcggccgttcggcgctgaagtacagctcgccgtagacatcgtcttcgatcagcgagatctgccgctcgcgcagcagcgccaccagacgctgtttgttggcctccggcagggtggcgccctgcgggttctggaagtgggtcatcagccagcaggctttgatcggatactgctccaccgcctgctgcaacgcgtccagatcgatgccgtcctgcggatgggtggcgatcgccaccgccttcagccgcagccgttccagcgcctgcagcgcgccgtaaaacgccggcgactcgatcgccacatagtcgcccggttgggtcaccgcctgcaggctgaggctgagcgactccatcgccccggcggtgataacgatttcgtccggcgcgacctgcatgccgctcagcgcataacgttgggcaatgtgccgccgcagcgcgtcgttgcccggcggcaggttagccagcgaactgtgcggcgtgaatttgcgcgctacgctgctcagcgcccgcgccagcttcggctgggcgaacagcgtggcgtcgggaaaggccgaaccgaaaggcacgatgtccggatccttgcaggcctgcagcacgtcaaaaataaaggcgttgatgtccacctgctcgctcagcaacagtttctcgccgcgcgaaggctgaggcagcggctgcggacgcgccgccacgtagtaacccgactgcggccgggcgacgatccacccctggctctccaacagttggtaagactgcaccaccgtcatcaggcttaatccggcgcgtttgccgctctcgcgcagcgaaggcagcttgtcgcccgcccgccacacccggttctggatctgttctctaatctgttgcgcaagctgctcgtatcgggtcataaccattaactgttatatgaaaaagtaaaataactgtcactattatagtcactgtacttcgtgattaacttcacgccaagcttttcacataaaaatgacagctatactcaagaggttaatttatgttcaaccctaggaggcgccatgctgggtcttgatgcactggaactcgccagaatacagttcgccttcaccgtgtctttccatatcatcttccccgccatcaccatcggcttagccagctatctggcggtgctggagggattatggttgaaaacgcacaatgaagcctatcgtgagctttaccatttctggtcaaagattttcgccgttaacttcggcatgggcgtggtttccgggttggtgatggcctaccagttcggcaccaactggagctttttctccgagttcgccggcagcattaccgggccgctgctgacttatgaagtgctgaccgccttcttcctcgaagccggtttcctcggcgtgatgctgttcggctggaaccgcgtcggcccagggctgcacttcttcgccacctgcatggtggcgctcggcacgctgatctccaccttctggatcctggcctccaacagctggatgcagaccccgcagggacacgaaatcatcaacggccaggtggtgccggtcgactggctgaaggtgatcttcaacccgtccttcccgtatcgcctgctgcacatgtccaccgcagccttcctctcctcggcgttcttcgtcggcgcttccgccgcctggcacctgctgcgcggccgcgatacgccggcgatgcgcaagatgctgtcgatggcgatgtggatggcgctgatcgtcgcgccggtgcaggcgctgatcggcgatgcgcacggcctgaatacgctgaaacaccagccggcgaagatcgccgccatcgaaggccactgggaaaacccgccgggcgaagccacgccgctgatcctggtcggttggccggacatgcagcgtgaagagacccgcttcaagctggaggtgccctatctcggcagcctgatcctaacgcacagcctgaccgagcaggtgccggcgctcaaatccttcccgccggaggatcgccccaactccaccgtggtgttctggtcgttccgcatcatggtcgggctgggcatgctgatgatcctggccggggtgtggagcctgtggctgcgctggcgcggcgggctctatcagtcgcgtccgttcctgtacttcattctgtggatgggcccatccggactgctggcgctgctggcgggctggttcaccaccgagatcggccgccagccgtgggtggtgtatggcctgctgcgcaccaaggatgcggtctccgcgcacggcgatctgcacatgagcatcagcctgctggcgtttatcatcgtctattgctcggtattcggcgtgggctactcctacatgatgcgcctgatccgcaaagggccgcagccgcatgagcaccaagaagacaataccgagggccgcccggcgcgtccgctgtccgcggtcaacgacactctggacgacaggagctgaacatgggtatcgatcttccgctgatttggtttgtgatcatcgtgttcagcaccatgatgtatgtggtgatggacggtttcgatttgggcatcggcatcctgtttccgtgggtgaaagagagcggcgatcgcgatctgatgatgaacaccgtcgccccagtgtgggacggcaatgagacctggctggtgctgggcggtgcggcgctgttcggcgccttcccgctggcctactcggtgatcctcgacgcgctggcgatcccgctgacgctgatgctgatcgggctgattttccgcggcgtggccttcgagtttcgcttcaaggcgacgccgcagaagcgccatatctgggacaaggcgttcatctggggctctctcttcgccaccttcagccagggggtagtggtgggcgccgtgatcaacggtttcccggtcgaaggccgcacctacgccggcggcgcgctggactggctgacgccgttcgcgctgttctgcgggctggggctggtggtaacctacgccctgctcggttgcacctggttggtgatgaaaaccgccggcgatctgcaggcgcgcatgtattacctggcgacgccgctgctggcgatcctgttgctggtgctggccgcagtcagtatctggacgccgatcgcgcatccggaaatcgccgcccgctggtttacgctgccgaacctgttctggctgctgccggtgccgctgctggtgctgctcagcgcctggggcattcagcgcggggtgaaacgcggcgcgcactactcgccattcatgctgacgctgttgctggtgttcctcggcctgagcgggcttggcatcagcatctggccgcacctgatcccgccggccatcagcctgtgggacgccgccgcgccgccgcagagcctcggctttatgctggtgggcgcgctgttcatcatcccgatcatcctggtctacaccttctggagctactacgtgttccgcggcaagatcagccatgagcacggctatcactgaggagggaggacgctatgcaagataaaacggcagccgtcgctccggcgccctggtggaaacgcatcggttggctggtgatcatctggagcgccagcgtgctggggctgttcgtggtcgcctcgctgttccgcctgctgatgaccgcggcgggcatgaagtcgcattaacgcggcgccttatctggacgcgctgttgggaaagtaaaaagagaccaccagcgtgaccagcggcaaggcgccgatcttcaccagctcgaacacttgaccgagcgcttcgtttttgtcccaatacgcgtgggcggcgaatacgcccacgctgaccgcaaatatcccgcacagtacctggcgcgccaggcgcagccgctccatttcgtcgaagaccaacacctgctccagataaacctggctggcttcatcgcgcagattacggctttcgatgctcatgggaagatctccacgacccgtcccaccgcttcaagctgttcgccattctctcgtacgatgcctagacacgtaccatcctgcttcatccagtacttatcggcaatggcgatcagtgcaaacgccattttgattacctcggttttttccatcccgtgacgccgggcgatatcgttcagatcatcatcaattttgttcgataaccgaataggtaaactccgcatactccacctcctgtggtcgttgattcaccgggggaaagtctactggaagggtaaatgtcgttcaattagtgaactgcgtaacgcctcgcataacccgcatgcaacgctagtgcggcttgcgccccatcgcgctgaggaaacgctgctgcaggcgcaacagctcctccaactccagcaggcggtagtcgatgccgaaacgcggcgccacctcgccgataatgcggctcagcgccgggtaatggcggtggctccagtgcgggaacagatgatgcgtcaaatgcaggttcgccccgccgagccagtaccccagccagcgcggccgggtcagccagtcgaaggtagtggcgaacacatgatgataccagccgtgcggcattgcgccttgttctggcgcctggtagaagttggccttggcccagtgggtgccgatgatgagcatcacgaacagcagtgaagaaagcatctggctcagcaaatagaccagcaggatttgcccgatgccgatagccggcggcagcagccagcacgggatcgccagcgccagcagcaggtgcgccgccttccccgccagaaacccgatccagccacgcacgccctgctgcgccatgcgcgccgccacgcgggtgcggcccgccctgtccagccaatcgaacagccagatgtagtacggaaaagtcagcgccgccaccagcggccaatagtaacgctgcgcgcgcataaagggccgccagcgctggaacggcgtttgccgcagcacgccgttggcgtcgatgtcgggatcgtaatgttcgatattgttatgggcatgatggaacagcacgtgccgcacgcgccagcagtcgggatccaaccccagcggcacgctcaccagggcgttcaacccgcggttggcccaggggcgacggaaaaatgcgttgtgcgaggcgtcgtgcaccacgttcaccgtcaggaacatgccgataaagataaaaccgaaataacaggcgaaaaacgcccagccgttctgctgttgcaggctcagcccgtaacacaggccgcacagcgccagcagcagcgcgaccttcgccagcatgccgccgtcggcgaaacggtgatcgccgttggccgccagataatgctgggcggcctgcatcagcgcgcggtgcaacccgctgtcgtcgcgccgataggctaacggacgcagcggtttcacggctgccccataaggcgtaagaagcgctgttgttgcgccagcagttcgcgatagccgatgcagcgatacgccatgccgtgccgctgcgccacctctgccaccgccgcggccagcgccgggtaatggcgatgattccagccgggaaacaggtgatgggtcaggtgatagttcagcccgccggtcagatgctccagccagcgcggttcgggctgccagtcgcaggcggtggcgaaattgtgccgataccagccttgcggcatgctgtcgcccgtcggcgccgggtaaaactcggcctgcgcccaatgggtgcccagcagcaagaacaccaccagcagcgaggcgcacatctggctgagcgcgtaggccagcagcacccagccccagccgatgccgtgcaagtggcccacgaccagcggcgccaccagcaccagcgccagatgcgcgagcttgcacagcacgaacagcgtccaaccgccgcgtcccgccagcacgcgtttttcccgcagcggcgttttatcgagccgatcggaccaatcgaaaatccacgcgatgtaaggcaaggagagcgcggcgatcagcggccagtacagatgctgataacgcatatgcggtcgccagcgctggaacggtgtctggcggaaaaaaccgttctcttcggtatccagatcgtagtgttcgacgttggcgtaaacgtggtggtaatccacatgccgcgtgcgccagtagtccggatcgacgcccagcggcagcgtcaccaaccgccccaccagccgattggcccaggacgcacgcaggaaagcgttatgcgaagcatcgtggttgacgttgacgttaagcagcatgcccatggtcacgaacaggaaatagcagaggaaaaacgcccagggctgatgctgcagcaggctcaatgcgtaaaacccgacgcacaacgccagcaacagcgcggccttggccaaccgcgcggcatcggcatagcgatgatcgcccgccagacaggcgtgggccgcgcgcttaagatcgcggtggaaggcctgttcgccatcggcgggaaaacgcagcggcggcaatgattcagccatgcggttcctccacggcggccggtgcggccacccgtccccagcccagcgcgacgcacagggcatgcaacgccacggcggccatggcgatatgccaatagcgctgcggccaaccgagatagccgataaacagcagcggcatgcccagcgcgaccagcaaccagacggcgctcgcccaaggtcgcccttccgtcatgccgcccagcgccaccgagcccaacgccagcaacaccagcagcgccatttgcggccagttgatgtcgccgtagccgtaaccgtattggtagacgtaaccgaccaccagcgagaacaacagcatggcgccgctgaatacgctgagcgccgaacggcggtcgcgtggccggcccggcgccgggcgccaggccagacggaaatagcgcaggaacggcagattgctcgcccagaacgggttggcggacggcctgtcgccgccgacgccatagctgaacggcgtgctcggcaatgccgggcagaaggtgccgaacagcttgtcccagaagataaagctgccgccgaagttcttattggaataggccatatccttgacgtgatgcacccggtgatgcgccggcgtgaccaggattttttccagcacgccaagcttcggcgtcagcgcgttgtgattaaacagctggatgctgtagtgaaaaatagagaccgcaacaaacaccgacagcggcacgcccgccagcgccagcagcaaaaagaacgggatcgacgtcaacgacgaataccaggagttgcgcacccccagcgacagattgaaatgctcgccctgatggtgcaccacgtgcaccgcccacagcaggcggaaacgatggtgcagacggtgcagccagtagaaaccgaagtcccacgccagcagggcgaacagccacatcaacagcggcggccaggcgtccagcagccccaggctgaaatgcgcggccacgtagccgtagcaggtgatctccaacccgcggaacagccacagcatgatatggccggagttcaggttgaacaccagatcgtgccagttgaccggctcgcgacgcccccactgcagcgccaccgcctcggccaccacgatgaacagcatgaacactatcggcaatgccagatcgctcatcccatttctcctttaaccacgcgccggcgcagggtgttcatacgcagggccagccagccggcgaacagcgccagcagcgcgccgccggccaaatcgacaaacaaatggcggcgcagttgcagaatcgagaacgcgatcgccgcgccccacagcatccacagcgccgtgcgcactttgcgctcgccgtcgctcagcgcccacaccgccagcaccgtcagcgccatatgcaacgaaggcaggcagttctgcggcgaatccacctgggttaacgccgccagcagctgcgcgctgatcccgacgccatcgttctgcggataggccatggtggtcggccacagcaggtaaaccgccccggcgcccagcgcggtgagctgcatcgcccgcgtcagccatgtgatccgcggcagcggcgccagcagatagcccgccgggacaatgaggaagaacgacaggtagagccatatggccgtggggctgaacgggatcgcccggtcaagcgccgacggcggcaacagggttcccgccccctgcaggcgatcggtcagactatacaccaccccgaccgtcccccagccgagcaacatgtgccctagtctgaacagcgtatttttcatgctacctccgcctggcgcacgatgcgccgccgcttgcgatcgaactgcggcagcaccgcctgcgccgtcaaccgccattcgaggcgctcggtggcgatgccctggcgagcgaacagcgcgatcagctgcgcctgacagtgcgccaacgccgccgggctgcaatcggcaatcaattccaaccgccgttcgccgcgctggatcaggcggtaatcgctgctcagcggcaacgcattggcgatcgttcggctgcaggcatcggcgaacaccgcctgcggttgccgctgcgcatcgggcagcatcagttgatcgtcgcgccgcccctcgatacgggcgatcgcccgcgtcggctgcccgcacgggcagggttccttgcgcagcaccaacacatcatccagccgataacgcacgatcggctgcgtgctgcgggtaaagtcggtgatcaacggcgtaaaacgcagttcgtcgatccactgaggttcgatatgcaaaaactcttcgttcagatgcagcgtaccgtgcgcgcaggtcgcggcaagaaatccttcggtggcctgatacacttcgccgaccgccggaaatacctgcagcagcaggcggcggtcctgctcttcaagcacctcggccaccgagatcgcttttttgaccggcaatttcacctgcccggccagcaccgccagcgccaaggcgcgcagcacctgcgccggggccacgataatgctgggcgcctgccgttccaatgcgggcaaatgctcgctgaacggcgccagcagatcgtaaaacgccaggctcagccaacgattgttcacgctgtgatagagattattatccgcgcgcagaaacagcgcaacgcgctcgcccgccgacagcccgtccggcagcattttcgccagcatgccgccggcccacacctgctgttcgcgcgggctgacgacaaacacgccgcgctgcccggaagtgccggacgacaatccaacgctgtagcgcccgatcttcggcgtgaaatcgcgatccgcctcgctgcgctgcgcgcaggccagcaccgcatcgcgctgcagcccggcggtgttcatccggtcgaactgcgccatcatcagcgccttgtccatctgcggccattcggcgaacggccggcggctgaagccttgaaaataggggctcttgctcagcacccgacgggcaaagcccgcgagctgccgggcctgatgcgcctccagcgccgcacgatcgtcaaagcgcaggcgccgggcgcggaaatagtgccaaagggtcatgaacgggatcacaggtccccctcgtggcacagcaaaatgttgacctggccgcccgcccacagctggttgagccgctccagcgtgcgggtgtacgccaccgcgtcgtccatcaccagattggccaagcgcgaaggcccgcgcagcgtctggtaactcttcggcgaccaggcggcgtcgctggccagcagcgtccagccggcgtcggtgagaataaaggcgccgatatggccggccgcatgccccggcagcggcaccagcacgatctgcccttcgctgcccggcagcgcatagccgcgctcgaacggcgccagcagcgcaggcaacgccaccgagggaaaagcttccataaactgcaggttgctctcgaaatctgccgggatcagaccgggaataaaggcgcgcttcagcgccgcgaaaccgcgcagcccgcgggtttgctgccagccttcgccggagcaaataaagtcgagttggctgaaatcctgcagcccggcgatgtgatcggcgtgaaaatgcgagacgatcagcgcctgaatatccccctcggcgtaaccggcggcgcgcagctgatgcgccaacgactcggcgggatcgaaatagaccggcgtcatgcggcgataaaggctgaacacccccgactgcgtgtgctgctgaaaataatgcgcgtagccggtatcccacagccagcggcgctcccccacctccagcagataggcgcgcgccgggaatttgcatacccggaacccggcgccgcgcagcgccatgcagccgatatgcgtgcaatagcccacttcaaacacggtgaccttagccatgctgtccgcctccttgccgccgcaaccactcgccggtcaggcgaatgccctcttccatcgaataacgcggctgatagcccagctcttcgatcgcacgggtctggctcagcgtcatgtcaaaatgcaccgccgccacgctgtagcgcgtcagcagcggttccttgccgctcagcgtcgcccacagctccatgccgccggccagcgtatgcagcaacggatagggcacggcctgcagccggtagcgcagccccagttcctgacgcagcagcgcatccagcatctcccgccagccgctgcggctggtgattggtaatgttgtaaacggtgccggacggcaacccgcgctgccggctggccaggtccatcgcgtgcaccacgttgggggcgaaggtcaggtccagcagcgcttgcccgccgccgggcagccgcagcacgccgcgatcgcgttcgagctgctgcaacagccgcggcacgatcacccgatcgtgcgggccaaacaggccgcgcggccgcagcataatgtaggtggtttgcgggtagatcttcgcctgcgccaacaggcgttgttcagccgcatacttgctggcggcatagtgattggcgaagcgccgggcgcggtaaccttcgtcaagatcgtaatgcggctgaaaatcgaagtagattgccggcgtggagatatgcacaaagcgccgcacgccgcagcgccccgccgcctccgccagcctctccgtcgccgcggcgttgatgcggtgaaactccgctttgccgccccagggtgaagacttggccgcacagtgccacacccactcgcagtcggtgacgagctgccggcactgctgcggcgtggcctgcgccagatcgagcgcacaaaactcggcgcccagccgacacaacgctgcgccggcccgctcgtcgcggccggtggcgcgcacctgatgtccggcctccagcagccactgcgccgcgttgcgtcccagcccgctggtcgccccggtgaccagcaccctcatggcagcaacaccatgccggccagcgccagcccggcggcggtgccgatcagcatcaccggctggccggggttgaagcgcccggtggtcacggcggcatgcagcgccgtcgggatggacgccgccacctgattgccatgatagcggtagatatccaccagcgcctcgctggagacgtgcagccgtttgcgcatatgttcgagcgacagatgactggcctgatgcggcaccacggtgacgatctgcgccagggtcaggccgctggcgctcagcagccggtcgaggtaatcctcaatcagcgccgacgcctggcggaacagaggcttgccctgcatatgaaacaggaagtcttgctcgcacatgccggcgcgcgggttgcgacgcgtgccgccggcgcggatctcgcacagttcgctgccggcggggtaggtttccaccaggctggcgaggatgccgctggcgccgtcgccgcgctccacgatggcgcaggccgcgccgtcgccgaagatcagcgacgactcttcgtgctgccagtcgatgccgcgtgaagcgagatccgccgagacgatggcgatgcgtcgatacgtcccggcgttcagcagccccgcagccacctgcagcgcagagataaagctgacgcagctgctgttgatgtcgaagcccggcgtgcccggcgccagtcccgccaccttgagaatatgcgcggcggtgcacggcagcgcctgcaccgaaatcgccgaggcggagatcagcagatcgatcgagtctgccggaatggcgcggcgagccagcgcatcttgcagcgcggcggcggcgagttcggcctggctggcatcgtcggcggcgtgatagcggtaaacgatgcccgagcgtttttcaacgtagccggccggtttccccagccgagcgtcgagcgcagaggacgccacgcggttaggcggcaacgcggccccggtggcgatgattttcagaggcagcagctcgggtgagcgaaattgtgtggtcattattgttattgattaacctgactatccataaagcgattctcccgcacgacgcgaaggccacgcggatcatccccggtttttatatcccaaaatgcctttcatcaaggcggtatctcttgttatcggctaccacgggccgacgtccgtcggcgcaagcataagcgtaacatgactgagatattcagtttacgacaaggcggggagaatgggcagacggcgggcgaattatcggaatagcgccgccgctggcgatcagcggcggcggcggggtcagactcagcggcggttgcgcaccagctggtaacggcgtgtcaggtactctaccggcgcactccagatatgcaccaggcggcagaacgggaacagcacgaacagcgtcatgcccagcaccatgtgcagcttgaagatcagcgccacgccttccaggtgcgcagaagcgccggcgtggaaggtcaccaccgcctgcgcccaggccaccagcttcatcatttcgctgccgtccatatgctgggcggagaacggaatggtcagcaggccgagacacacctgcaccaccagcaacgtcaggatcaggatgtcggcgaagctgctggtggcgcgcacccgcgggttggccaaccggcgtttgagcaacagcgcgccgccgatcagcgtcatcaggccgcaggcgccgccggcgatcatcgccagcttctgcttcacgtcgatcggcagaaaggcctcatacatccagtgcggcgtcagcatgccgaggaaatggcccgcgaagatgccgataatgccgatgtggaacaggttggacgccagccgcatgccttttttatccagcatctggctggagccggcgcgccagctgtattgcccgtagtcgtagcgcagccagctgccgatcaggaacaccgcgccggccagataagggtagatgtcgaagaagaactgattcaaaaattgcatgattagcgtcctttggttccggttaacgcatccgtcaggtccagatactgtggcgccaccgcgccggcgaagcgccgctggtgcaccgtctgctgggcggaggcgcagccctgctcgccgagaaatttgacctgctcctcttcccataccgcatccagcgcctgcggcgtatcgtcgcgcgcctcttgcgccacctgcgtcttcagcgcctgcgcctgcgcatcgctgccggacagcgccaacagcagatcgaacagcaccgcatacgggctttcgcgctgctgcaagcgcgcgcccaacagcgccaggatcggcgcaatgtcctgcagcccttcccgcgcctgcgccgcgctgcggctggccagatactccagatacagtggcaggaaatccggcagctcgcggctgtcgatctccagcccggcggcgcggtactgcgccatcaggtcaaccatcgcctggccgcgatcgcgcgattcgccgtgcacgtgttcaaacagcagcagcgaagtggcgcggccgcgatcgaacagttcgcaataatcggcctgcgcgtccagcaacgggcgtgcacacaggcggcggataaacagaatcagctgcgcgctgtggcgcagatccagctcgctggccggctccaatgcttcgatcagcgcctgctgatggtcaaacagcgcctgctccgggtaatccagcaggcgggcgatcactttcaggctgatcatgaggcgtcctccggccgcgcggttttcgcggtcacgtcgatggcgtcaatgcggcggctgttgaacaggttgaacttgccgtcgctgccatggcaaccgtcgccgaagctgaagccgcagcctttgctttccgggaaggcttcacgcgccagctcgcggtggctcgacggcaccacgaagcgatcttcatagttggcgatcgccaggtagcgatacatttcctgcgcctgcgcttcgcttaacccaacctgctccagcgcgctggtgtcgaccacgccgtcgacggtttccgcccgtttgtaatggcgcatcgccagcatgcgcttcagcgccaacagcacaggttcggtatcgccggcggtcagcaggttcgccagatactgcaccgggatgcgcaggctctcgacgtccggcaatacgccgctgtgcgccagttcgccggcgtcggcggcggactgaatcggcgacaatggcggcacgtaccacaccatcggcagcgtgcggtattccggatgcagcggcagcgccagcttccagtccatcgccattttgtacaccggcgactgctgagcggcttcaatgacgccctgcggcacgccgtccgccagcgcctgggcaatcaccttcggatcatgcggatcgaggaagatatcgagctggctctggtacagatccttgtcgctctccaccgccgccgcctgctcgatgcgatcggcgtcgtacagcagcacgccgaggtagcgaatgcggccgacgcaggtttccgaacagaccgtcggctgcccggcttcgatgcgcgggtagcagaagatgcacttctcggacttgccgctcttccagttgaagtagattttcttgtacgggcagccggtcaggcacatgcgccagccgcggcacttgtcctggtcgatcagcacgatgccgtcttcgccgcgcttgtagatcgccccgctcgggcaggtggcgacgcaggccgggttgaggcagtgctcgcacaggcgcggcaggtacatcatgaaggtgttttcgaactggccgtacatcgccttctgcaggttgtcgaagtttttgtcctgcgaacgtttttcaaattccccgccgaggatctcttcccagttcgggccgctttcgatcttgttcatgcgctggccggtgatcagcgagcgcgggcgcgccaccggctggtgcttgccctgtttggcggtgtgcagatgctggtagtcgtaatcgaacggctcgtagtagtcgtccagcgccggcacatccgggttggcgaagattttcgccagcacgccgacgcggctgcccatgcgcggctccagcttgccgttgattttacggatccagccgcccttccatttttcctgatcttcccaggcgtgcggatagccaacgccgggtttgctttccacgttgttgaaccaggcgtattccatgccttcgcggctggtccagacgttcttgcaggtgaccgaacaggtgtggcaaccgatgcacttgtccagattcagcaccatgccgacttgcgaacgaattttcatttgtggttctcctgctgactgccctgcgcgtagtcgttgccttcgtcgtccaaccaatcaatgcggttcatcttgcgcaccaccacgaactcgtcgcggttggaaccgacggtgccgtagtagttgaagccgtaggccagctgcgcatagccgccgatcatgtgggtcggcttcggacaggcgcgggtcaccgagttgtggatgccgccgcgttggctggtgatctccgagcccggcagattcacgatgcgctcctgcgcgtggtacatcatggtcatgccggccgggatacgctggctgaccaccgcgcgcgccgtcagcgcgccgttggcgttgaaggcctcgatccagtcgttgtccgcgatgcccagatctttggcgtcgtcttcgctcagccagacgatcggcccgccgcgcgacagcgtcagcatcagcaggttgtcgctgtaggtggagtggataccccacttctggtgcggcgtcaggaagttcagcgccttctccttgttgccgttcggcttgctgttgagcagcggctgggcggcgcgggtgtcgatcggcggcctgtacgccagcaggctttcgccgaaggcgcgcatccactcgtggtcctgatacagctgctggcggccgctgagggtgcgccacgggatcagctcgtgcacgttggtgtagcaggcgttataggagacgtgttcgtcttccaggccggaccaggttgggctggagatgattttgcgcggctgcgcctgaatgtcgcggaagcgaattttctcgtcttccttgttcagcgccagatgtcggtgatcgcggccggtgacgttgctcagggcttcccaggctttcaccgccacctggccgttggtttccggcgccagcgacaggatcacttccgccgcgtctatcgcgctctcgatcttcggccgccccgccgccgggccgtcggccttgacgtagttcagctgcttgaggaaatcgacctcggtctgggtgttccagctgatgcccttgccgccgttgcccagtttgtccatcaacggccccagggaggtaaaacgctcgtaggtggccggataatcgcgctccaccgcgatgatgtgcggcgcggttttgccggggatcagttcgcactcgcctttcttccagtcctgcacgccgtaaggctgcgccagctcggcggcggagtcgtgctgaataggcaaggtcaccacgtcggtttcctggcccagatggccgacgcacacctcggagaaggctttggcgatgcccttgtagatttcccagtcgctcttcgaatcccaggccggatcgaccgccgccgacagcggatgaatgaacgggtgcatgtcggaggtgttcatgtcgtctttttcgtaccaggtggcggtcggcagcaccacgtcggaatacaggcaggtgctcgacatgcggaaatcgagcgtcaccaccagatccagcttgccttcgccgccctgctcgcgccattccacttcctgcggcttcacgccgccctgctggccgagatctttcccctggatgccgttctcggtgcccaacaggtatttgagcatgtattcatgacccttgccggaagagcccagcaggttggagcgccagacgaacaggttgcgcgggaagttctgcggattgtccggctgctcggcggcaaagcccagcgcgccgctcttcaggctgtcgacggtgaactcgaccggcgattggccggcggcgcgggcctgctccgccaggcgcaacgggttagcgcccagctgcggcgccgacggcagccagcccatgcgctcggcgcgcacgttgaagtcgatcaggctgccgccgaagcgcgatttgtccgccagcggcgacagcagctcatcggcgccgacggtttcatagcgccattggctggaatggttgtagaagaacgaggtgctgttcatgtggcgcggcgggcgttgccagtcgaggccgaacgccagcggcagccagccggtttgcggccgcagtttttcctggccgacgtagtgcgcccagccgccgccgctctggccgacgcaaccgcagaagatcagcatattgatcaggccgcggtaggtcatgtccatgtgataccagtggttgacgccggcgccgacgatgatcatcgaacggccgtgggtcttctcggcgttttgcgcgaattcgcgggcaatgcggatgatgttatggcgcgacacgccggtgatctgctcggcccaggccgggctgtaagccttgacctcgtcatagtcggcagcgcagttggcgtcgcccaacccgcgctccaggccgtagttagccagcgtcagatcgtacacgctggtcaccagcgcttcgctgccgtccgccaactgcaggcgtttcaccggcagtttgtgcagcaggatctcgtccagcgccacgctgttgaaatgctcgctgtcggcgccgccgaagtacgggaaacccacctcggcaacgtcgtcatgcatgcccaacaggctgagttgcagctcgacttcctgttgcgacttgccttcgcgctgctccaggttccacttgcccttctcgccccagcggaagccgatggagccctgcggcgccaccagctctccgctgcggctgtcgatagcgacggttttccattcggggttgttttcctggcccaacccgtccaccagatcggcggcgcgcaacaggcggccggcggcgtagtggccgccttcacgcggctcgagcagcaccagcatcggcatgtcggtatagcgacgcacatagtcgcggaagtagccaacttcgcgatcgagatggaactctttcagcatcacgtggcccatcgccagcgccatcgcgctgtcggtgccctgcttcggattcagccagtggtcgcacagcttggcgacttcggcatagtccggcgtcaccgccacggttttggtgcccttgtagcgcacttcggtaaagaagtgggcgtccggggtgcgcgtttgcggcacgttggagccccaggcgataatgtaagaagagttataccagtcggcggactccggcacgtcggtctgctcgccccaggtcatcggcgaagccggcggcaaatcgcaataccagtcgtagaagctcaggcaggcgccgccgatcagcgacaggtagcgggcgccggcggcgtaggacaccatcgacatcgccgggatcggcgagaagccgataatgcggtccgggccgaaggttttggcggtgtagacgttggcggcggcgatcagttcattgacctcctgccagctggagcggacgaaaccgccgcggccgcgcgccaccttgtagctcttggctttttccgcatcgccgacgatagagccccaggcttcgaccggatcgctgtgctgcgctttcgcttcgcgccacagcttgagcaggcgcttgcgcatcagcgggtatttcagccggttggcgctgtacaggtaccaggagtagctggcgcctcgcgggcagccgcgcggttcatggttgggcagatcggggcgggtgcgcggatagtcggtttgctgggtttcccaggtcaccagaccattcttcacgtagatcttccaactgcaggaaccggtgcagttcacgccgtgggtggaacgcaccactttgtcgtgctgccaacggctgcggtagccgtcttcccagtcgcggttggtgttcaaggtctggccgtgatcgccagaaaaaggctccgccaactgcttgaaatagcggaaacggtctaaaaatttgctcatccggaatgctcctgaaggctcttgtcgttataagaagacatgctcaatctgccgccagcctactgacggccaagaggcggcaaattgattgcgatcaagagaaagcgggaggcgccgcgcgcgtcggctgagaaataccaccaaagtataggtgtgaaagattaagttaattaattgaattaaaacgagtaaaacagaatatagagataaaggtgggcaggcgggaggcaaggcggggtatttgggggtaggacgcgggagaaacctcccgcgtcagactgttgacaaagggggaaaaagcgtggtttttccccctctgtggtgagcggccgaaaatcaataaattgattttccttgttttttatttgatgctctctgccaacccggcaagggtataaggtttgtcatcaatctcacgcgggagaaacctcccgcgtgatgctaactcgatgctttcagcgttggagccacagcgtcgcggtgcccactgcgggcaacgccagcgcgatctccgcacccgcgccctgctgccgccagcccgccggaaggcgcaagcgggtgcttccctcccgatagtaaggattggctaccagcagcaaggcgcgatcgcccagaataaacatccgcgccggcatttgcgggtcgcttcccgccagcggcgtcgattttcccgtcagcagataaggggtgaaggcggcgatttgctgcgacacggcagccacaccacgccaggtggcgtcaaactcccgttggtcgaagcggccggttttgcgtttgtaaaacagatcggtataagaataaaacaacagccccttggcgccgccgatcagcgcctgccaggcctgattgcggatttccgcctctgacggcggatgtggcttgcggcgggcgtcataagcggcgtgatccatgatttgcatcaccacccaggctccgcgtgcctggcgggcggcctgcaccgtcagtgcggtataacgcgtggtgcgcgtcagatcgctatcgttccccaccggataagggtcggtcgccaaaatgtcgctgctgttgaagtgagcgtccaactccccggttttgttcagcacctggaaagtcggatgatcgccgtcaagtcgctttatttgcaggtttttttcctcgattttatcgagatattccggccccagctcatcgttgatgtaccaggcaagcaggttgggctgagagcgcaaacgctgcacgtaccaggcagtcagcgccgcgtagtcgccaccgcggacggccggcgcgaagcggctgccgcggtactgatctttgacggagtaaatgaccaacagcccgcgcttgcgtgcgttgcggaaaaaggcgtatggatctttcttttccccgtaatcatagttcagcaccgtgttgaatcccgccgaggcgatgcgcgccaaatgctcatcggtagccacgttggcgtaaatgcccaacgggaaaagccgttgaccgtcgcgcagggtaaaaccttcgctgtcgatcgccactttggccgcaggctgcccgacgcgaaaagacagctcgctgccctgagcctggcgggattgtggaccggtaacctgctgacgcaggcggtattcaccctgggccaggccggccggcggttggtattcgatacggcgttgtccctcaacctgataacggtcgcggctactgtgaacaacctgcccctcggcattgagcaattcgctgtcgacctgcaaatgctgcggctgcgaagtgacgaccagcgtgtcaaccttcccctgcgccgacgcgccgagctgatataacgccggcatagacgctcgagcacaggcataggcgtcgtcaaaccaggcggtaccggtgctccccttacgcagataaacgccaaaagtgattcgcgccgcctgcggcggcacggtatagctggcgttcacctgccgccagccgctgtcgccggttaccccagccggatagctgccttccagaaagcgcccctgcgcatcaaagctctgcagataaaccccagcgccgccgtcgcggctttgcccgcgtacgccgcgagtcttgagccagacgccgaaatctatcgtctgtccgggcacaacctgcagcgcctggttgaaggtacggtattgcgctacatctgcattgtcataacgcagactccccctgccactgtgcgtatcgccgtcggcctgcgcgccctgcgctcgccagccgctgagcccctgctcaaagccggggttggtcaacagattgggttggcagttctgcgccagagccgctgcgccccacaaggcgcaacagcccagagccgcccgccgatacatccccctcatggtcatttccttttcaccacggcattgaacagataggtggcgaacaaatagcaggatttctggtacgacagccccaaatgctgacggtaaatccgccattgccagtccgcagcgcggattttgttgcccgacagcgaatgagtagacaatcggtaacaggccagcggttcgggaatgcagtaggccaggccgttacgcgccttctgcagcaccgccagccacatcaaatagtcctcatgccccactttttgctgatacaccttaccgatgcgcttctggttatagatgccggtgagattgccgatccagttgcttttcaacatgtcctgatagccgataagctcatccgcaccacgggtgtttttgatcaacttcagatcgtcttcgaaggtgtaataatgggaacacaccacgtcatagcggcgggtttgcaaaatgctcgcctggcgcgacagcttgttggggagccatacgtcatcactgtcgcagaaagcgatataatccccgctcgccgcctcaatgccgatgttgcgcgtttccgccacgccctggttatgctcattgcgtatataggtgaggcgatcgtggataaacggccgcaccacctcggcggtgttgtcggtggacgcatcatcgatcacatacaggtgatagtcggtaaattgctggttcagcacaccaagaatcgattctttgattgagtttgccgcgttgtaggcgggcattatcacggatatcttttccattcggtcctcactcaatgagctgttgccactggggataaatacgttcgggagaaaaacggcgagacttatcaagcgcagcgacagaaaagcgctcgcgcagagccggatcgcgcatcagttcgagcacgccttcgctgaaggcggcggcatcgtcatcgggcaccagatagccgttgacgccgttgtctatcagctcggccgggccggtcttgcagtcgtaggccaccagtggcaggccgaaactcatggcttcgatcagcaccatcggcaacccctcatagcgcgacgtcatcacgtacaaactggcctggcgataataggccgccacgtcggcggtggccggcagcaggctcacctgctgctccagcccggcgccttcaatctgccgccgcagtgcgtcgcgctcagggccgtcgccaataatcaacagccgccaatccggcatctgcgccgccacccctcgccacagcgcgatcagacgctcgaagcctttctgattgctcaaccgccccaccgccagcgccaccttttcctgcagcgccggcgtcggcgcctgtgcaccgaacggcgaaacgttctcgatcacccggcatttcccggcacccacccagcgagcgatggcgtcgctatcttgccgcgtcaggaaaatcacgcgatcgctcaagcggtaaaccaacaacttcaaccatttaaatacgcgcggatactggtgaaagctgacgtgttcgctcaataacagccggctgcgggcacagaacaaacgtagaaaaggcgtcatcaccaccgacagttttcccatggaaacggtaatgatcacatccgcgcgttcacgccgcagagccaacgccagccgccatggccagaacagcgaatcgccgccgccacagcgtagccggacgttgctcgccagcggaaagaagctccgttcgccacacagcgaaaacaccgccacctcgtaattcggcagacgcgccagcgcattggccaaaccgctggcgacccgttcagtgccgcccttgcccgccatattttcgatgacgatgattaccttgcgtgcttgcatatcatctcctgaatccctggcgcacattgcgcaacagccggccgccaaccgagaacaaccccagccgcgtcagacaatcgccataccatttgatcatcttgaacttgccgctcaggctgtgccgcacgatgcgcgacgaataatagttgaacgcctgggcgttttccgaatacagcgaggccagcaggtgcttgcaggcgaatccgctgatatggcgatcgctggggctgaggaaggtattgatgaagcggtcgctggcctccagattaagcttcgccgtcatgcgtccgtagcgccccacgtcgagaaacaccccgccgccggcgtcatgcgccacttgcgcgcccaaattggtggcgttgaccagaaagccccaatcctgatgtttgttgagaaactcgggaaataaaaagcggcgatcgctttttttacgcatgctgatggtggatgaccgaatatcacccatttccagaaaaagaaaatcctcaccggaagaaccggatttgtagtggaaattgaagtcgcgtaccgaatcaccactcacctctgcataattaccgaagataatatcaatatggcgatcttcatgcttcttcatgcggcgaataatatagttggtagtgaagtaatcatccgaatcgagaaaaaacacgatctccgattgcgctaaattggcgcccaggttgcgcgataccgccgcattgctcttttgttttttctcatgcagcatcacgttgctattagtcgccgctatctggcgaatatatttgatatcatcctcgtcagagcaatcatcaaccaaaatcacctgatagtcgaacccttggcaagcgttgaaaatccgcttcagagttttaggcaggtaacgcgcactattataaatagggatcacgatcgagaaatccatttcttaaccctccaacttagaatttatcatttcttttccacggcaaagcagcaataacgacacgttaaataccgggaccaaaaaataggtttccgtaaaagttgttagcaggaaaaccaccaccacccagcgcatgaatcgactcagcctgcgcatattccccaacaggtgaaaataacaaaaaagcatgacaacagaggctatcccaccagccgaataaaacatggcgatgaagaaaaaatcgaccggcttatagggttcgatattcatgccgaacagcggattgggtagccccaccgcctgaaacatctgccaggagaaccagatgcgcccggtcaacgcctggttcaacagcgcgtccaatgccggattgttcccccagcgtataacgctggcgaactgaaagcctatgatagccaacgtcagcgcaatgcagacttttctattgggggtaaaacgcagcagcggcgccagccaaaacagcaacaacatcaacagcgccaacataaaacaggtgcgggaataggaatacatcagcaccgggataattaacgccgacacccccagtgaggcgatatttttcattccacgcgttaattttgcatggtcgatcaggcacagcagcatggcgaacaaggcaaaagaataatacgccaaggtgttcgggttatcgaaacccagcgttaatctgttgccatagcgctcatcaagataaacaaatccctcggtgtaaaaggtataggggataaccatcaacagcccggcaaccacaaaagcgatagcgaacatttcagcgccgcgcaccatctcgatgcggcggaataaaattatcaccgccgagctgaataccgcgccaaaaaggtaatcaccatgtccggtggcgatattaaccagaaacagcagaaccaaaaaacccgcaaccgctttttccgccatcgtagcgatgaaaaatgcatagccgacatagagcaacattagggcattaagccccgtcacggttttattaatcagctcgctgttgaacgatcccgaggtcaggaaagttttcacgaaaaagatcaacaggaaggtcaatatgattgattgattgaccaaatcccgcgactgattataaccgacattggcatgcatgtgaaaattggaggcgactctctgcataagcgtttactcagtaaaataactgccccattcctgctcgatgttttccggcttaagcttgcttaaccccgcaccaggcgtaaacgtcaattcaccgaaatagaccttctcaccgacctggtagaaatccacgcggacataagagaactgctgcgcaacctggcgagccaagcgcgtcatttcttccaaccgcgtaggccgcggcatcggttcgtcggcattcggcaagctgatgcggatttcggtgcggttccagtcgatatcaaaaatgtcgcgccgatgggtgccgaaacgctggtaatccacctggatgaacatgcgaatttcatggttgtcgttgaaacaatgaaacttgatatcgttcggcacctgctcaccatccagcaacatgcgttccaccatgatgcagggttcgatgtccagataatgcttttcgcgactctgctcgtaaaagttgctgcgcatccacgaactactgagatcgtacaattccgcgtagctaacctgttgcttgtcgaacaccaaccggttatagccgctgccatggttggccttcagcacgaaggcgtcgggcaactgcctgaacgtgtcgtagctgagttccgtgccatgcgcatacagctctaccagatactcttcgccccacaggccggcaataaattcacggaccttgtatttgtccgacaaggtggtgtagatgctgcgcggataaattttgcggcgcatgatcttttcgctgaagccggtcggttttgacaggtgcggcagttttttgaaatagagcgcgtatttaacctgatggtgccaggcatcgggcaggcgcttggaaatgcttttaaccagggtgtttaacatgctctctccttaatttgctgacaagacgcggcaggcagtaaaaacaggtcagctgcagtcgggtaattttcccgccacggaataaactgttcagaacgaagaatgaaatgaattccgccagtagcgtagacaccgcagcgccggtcaggccgtaccgcgggatcagcagcagattcatcgccacgttcatcagagccaccaacggcatcttgatggcgataaagtgataaccggcgaacagcacgatgctgcggtacgaaaccgtccccatcactgagaacagcgaggtcagcgtacaaatagccaggatgtcggcggccggttgaaaagcggcgccatacagcagcgcaatagccgggtgggcgaaccaccacagccccagcagcaccggcaacgacaggcccaataccaccagatacagcacccggatgcggtactcctgctccaacggatcgcgacagttggcaatacccggcatcaacgaggtgatcagtgccatcggcacaaaaacccacccctgactgagggtggtagcggcgctgaaccagcccaccgcctgctcgccgaccagattgcccagcatgatttgatcgatgcgggtataaatcactatcgccagactggagatggccaacggcaggcccactttcagcaaataacggccatagcgcctggcctggcgcggcgtaacccgcggcgtggccgcagcttccccacggaatagccagaggcgcgccagataaggtacggcgctgctgaggatgtagggtaccgcgaaccacaccagcggcagcgcaacgctcaccagcgccagccgcagcccgatcgacagcagcagcgccaggttgttgatcagcgtattgcgtttcgactgcaggcgggcatcgtaataaattttgtacacgtcctgaatcgagaaataggcgctgataagcagcaacagcgtcatcagttgactggctggcggctggctgaaatagctccatatcagcatcggcagcgccaccaccaggaacagccggcggcgcaaacgcatcgaagccaacatcaggcgaatgccgctcggctggcggcgggcgacgcggttgaaaatgatgctgtcggcgcccagctgcaccagcggcaccacgatggcgatcgtcgccaatagatagttgagagcgccaaactgggcgggccccagatagcgcgcaacgtaaatggagacgaagatgccggacaggctgagcgaaacgcgttccagcatcagccacagggcgttggtgataatggccttcacccgcttattcctctgcctgccggtgatcttcccgatggcttggataggcgaagttgtaatagctcatgtcggtcgccgccctcttcacgatgccgttgaggattacgcctctgatcgccacgccattttgttcgaaacggcgcatgctggtttcgatctgcttgacggtgttcacctcaaaacgcaccaccaacagtgacgtaccggcgtgattgccgacgatggccgcgtccgtcaccgccagaatcggtggcgtatcaatcagcaccagatcgtagttttgcccggcccagcgcaggaaatcggcgaaacggcgatgcatcagcagctcggacgggttcggcggcacctggccacgcggtacgaaatccagattggcaatggcggttttccgcaccgcctgttccgtcgtcactttgcccaccagcatgtcggacagcccttgatgagcgtcgtccgatagccaacgatgcaaaaatcctttacgcatatccgcgtcgatcaacagcacccgctgcccggcctgcgccaccaccaccgccaggttggtgctggtaaaactcttgccgctttccgggctggcaccggagaccatcaaaatgttgtttttggcctccagcatagcgaaatgcaggctggtgcgcaggctgcgaatggcctccaccgacagatccgccggctcggccaccgccaggatcggcaggcgacgaccgccggatttgggcaacagcaggcgttgttcgcgattgcgtttcgcctgccatggcgacagcggcacggtggcgtagacgttgatgcctcgcttctccagcgtatcgatatcattgatgccgcgatggaaggccgtgcgcagcagcaccacggctgcggtgcctgcagcgcccaatatcaacgccaacaacacgattagcatcttttgcggctgaatcggtcggatagcggtttccgcctcgtcaacgatgcgaatattacccaccgtgccggccttgctgatgctcagctcctgctgtttgttcatcagttgcatgtaaacctgctgatccacctgcacgtcgcgggtgagacgcaggatctcctgctgcattttcggcagcgtctgtacctgcttgccgagccgcgccttttccgcctccagcgtggcgcgcttttccatcagcgcccggtaagccgggtgcacgcgggtataaagcttggaaatctccgcctctttgaaggtcagctcgttgagctgggcttcgagctgtacctgcgtgtccagcaccgacttggcttccagcgacagatccaccgagtcgttttgctggcggaactggttgagctgggtttcggcgttgttgagcgaggtttgcgtttgcggcaactgctcctgcaggaaggccagcatccgctgcgcctcttccgttttgcgatccacgttctgctgcaggtagttatcggtgatgttcttcagcaccgcctcggcacgctgcggatcttcgctcggcagcgtaaacgtcatgatgccgctgtctttgccgctcggcactacgcccaggtatttacgcagatcgtccaccgcttcttgacgcgcgactttaaccacggtgaaactggtgcccggcgccgcgtccagcgccgaaacggtcatgccccactcgccctgcgccaccggttgcccaaccacgccgctgaacaatttggcgccgtcatggctcagctcgtaatgttgcccatcgcgcaccgtcagcgtcagcgcttcgccctgcatgtccgccggcgttgtcagcgtggcgatgtccaataccggcgccttttcaccgctcagtcgggcaaagcctttaccgaataccgggaaatagtccggttcgacgcgcaccgtcaggccgagggcatccaccgttttgccgagcacgtagcgcgacttgaccagcgtcacctcatcctgcgtcgccgcattttgccccagcgaactgtccagcgtttcacgcagcagcgaatcgccggacagctgattctccacctgcaccaccgccgtggcctggtacaccggggtagccaacagggcgtaggcgacgcccagcgcaccgaccacgccggtcacgacggcgatccgccagcggttatcccacagcggccctaccagacgctcccactccagcttttcatcttgttcggccaccatcacggacagcgcattatttttcatcttctgttccttattcaccctgctgagttaccagttgcgcacgcgcaaggtagcctcgctgagatcgttaaaactgctgatggtcggcaccagctggctgatcaaacggttccagcgcgcgaccggcgccgcggtgacgtacacgacgtcgtaagggtgcagctgaaattcagcgcccatcgccagcgcgctggcgtcggagagatcgaactgatacagcgtcgccagccgctgcgggggattgccgccgctcggccggatcacgaacaccccggtcgcatccgccaccgtctggctgatcccttcggaagatccgagggcttcggtcagggtcatgccgctgcgatccatcttcagcgtcgcttgcttgcccacctcgcccatcacgaacactttcaagttgtcattgcgcggaatgtagaggatgtcgcccggctgcagcagctcgttctggctgatgtcgccacgctgcatcagcgcctgcagcgagatggcccgctctttgccctgatgggtcagcaccacgttgcgccagtcggcattgtccgtcaggccgccggcggcgttgatcgcatccagaatggtcagcggcacgttggtgatcgcctgctgaccggaggttttcacctcaccggtcacataagccttctgcgaacggaacgcggcgatgctgacatccacctgcgggctttccacatactgcgccagacggccggcgatcaggctgcgcacttcggtgacggttttacccactaccgccacgcgcccgatataggggtaaaagatcgtgccatccgcatgcacccagttaccggtgtcgctggcgctgcgatattgcccggccggcgtggtcaactcggggtgatcccagacggtgacgttcaacacgtcgccgacgccgatacggtattggtagctctgcaaccgctgatccagtgccggattcggctgggcgaccggttcaacgcgccgcattttctgcagcagcatcggtgacatgcgataaacctgtacctggctattcaaatcgaaatcgtcgtcttgttgcacgacgatggcttttccgctggtcgataaatgtgagccgggaaccaccgtacaaccgctcaacaacgcggaggtgaaggccaacggcatcaaaagaggcaaatgaaaattcatggaagtaccgtgataaacgggctgctgccgcagcccgtgagaggattaacgcccgacggttggattatcgctgagcatcgtcgcctgacgcggttcgcgcaacatggcgaaataaccgcaaaaacagaacagaaacgccaccagcatcaggctttcctgcagttgcaacacttcactgcaaatgccgatgcaggccagcgtcaccgccagcatggtgctcatcgccagtgcctgacgcgcattgagcccgcgacgcatcagaatatggtgcaaatgatcgcggcccgctttgaaggggctttggcggcgcaacaggcggcgcaccatcacggtcaccatgtccatcagcggaatggcgatcagccacagcgcggtgaccgggcgcattaccgcctgctgcccctgcgtcgccagcaacaccagccacagcacgctgaaaccgatcaccatgctgccggcgtcccccataaagattttgttacgcgcgccgaacaggctcaggttgaacagcagataagccgccagcgcgacgatcatgcccaggcaccacagcgccagatcttcccggccacccagtccgaacacgatggccagcgcaacaaaggtcacgcaggacaaggcgcccagttgcccgtcgatgccatccaccatgttgtaggcgttgatcgctccccataccgccagcggcgtgagcagcaacgcgccataaccgagcatcacttcctgatggccccaggcatggcccaatgaggaaagctgcatccctgccgccagcatcatcgccagcgcgatccctccctgcaccatgacgcgcggcgccacgggcagatcaaagcggtcatccagtacgcccaacaccaccagcgccgtgatgcacagcaggtagacggtgttgtcgggcagccagacgggttgccacagcgtcatcagcatcagtgtcaggtaaacggcgatgccgccgaccaacggaatatgtcccagatgttgcttgcgcgcattgggcttatccactaatcccaccgtcaaggcgacccggcgggcaataaggatccacgcgaccgccagcacaaatatcacgctcagttgatataacatcgttcctccagcgaataagcacgctaccgcccttgagttacagctcccaatgcgctattaacaaaaacaaaattgatcctgccaggatataagtcagcatgaatttatcctgaaaaatacagatttatccgcttgtcggcggaataatcaaataacgtcagcgtgcgattaagttatctatcagaaaactcatgtttaatggttctttcgattgccgaatcaagttcaacaggcgccacgaaattatttttcacattacttttaaactgcgttctggcgcagaatttctgtactctgacacgactgattgggaatttctttcgacttattttactcacaacatccaatgcggttgcgccgcatatgcctacggcataaggaatgcgaatcgtcttattttctctccccaatgaagaggaaattacgtcaaccaattgattcatcgtaaagtccggtttatcgacgtagttgctgacctgataacttgactgttgatccagtgcatattccagccgcgcggcaatattttcaacgtaggccatcgacttcatattattgccgctgccaatcatcacgaaacgtccgctggcgatctgacggaacaggttatacacattgccacggttgccttcgccgaataccaccgttgggcggatgatagtcaaccgattttcctcatcggccttgcgccaggcttcataaacgtattccgcctcgagcttggatttgccgtaatggttgaaaggctcgaaacgtccttcttcgccggtctcctgtttgacgaagccgtaaacagcgaccgaggaggtgaaaatgatttgacggatattcagggcggaggcggtcatgcagacatggcgcgcgccttcgacattgacctgataatagagcgaaataggatcgacattgtcctgatgctccgccgccagattaatgatggcgtcgcagcccgccagcggttcttgcaaggtctggggttgcgtcacatcgccatactgataaagggatggaaaatgtgcactgggttgcttatcgacgatgaccaatgtcagatcatcgcgcttactgagacgcttagccaggcgtgttccgataaaaccggaacccccgataatagctactttacgcttatccataatttgtcactcagcaggttatcattattcccgtcacccgattgggacaggacgctaatacgcgttaggtaatgatttccagactggacaaatcgaacctggctttcaaataacaaataatgaaataaaagattttatcaaatgtaaaattatcgctaaagataaaacctcatttagcgttaatttttaacatcgtaagcaacttgatattgcaaggttttattcggcaatataagattaatccgacctttgcccggcgtcgaagaggtctcatattttaccggcagtttcagatgaccttgcttaggatcgacacattcgatggtggcttgatccatgttctctccctgatacagacagaccagcgtttgcgggctgttggtatgggggttattcagcgtcagcgtcaacaccacgcgcgtgttgttctgaatatcattgatcaccggggggcgggtttggttgccgagcacatatgaaaaatgtgaaataaccagcaaagaggcgagtagcgtcaggtatttcactacactgctggcgggcatgctgaaaaagcgacgcgccgccgccgactttttttcacgcgccggttctttggatgactccaccgttgccacaggcgcagcaaccagcgtcgatttatgcggcttatctattttttcatcgtttgtttcagacgactcactttcactttcagaaagttccgcttgaatatcaacgccaatatcttcaccgccatttaatatatcatcatcagcgtagtcttcatcctcggatataaagtgaaaagccgcttgattttccaccttgtaacccaaacgaggaatggttctgataagcgtgtgttccgtgtcgctaattttttggcgaatagatttaattgtttgatttatcgttgaatctgaacaataggttcctttccagatattttctataatttccgttcgggtaaccagttctggcgatctggcgacaagcagcgaaagaatttgatactccttccaacgcagacgaagtttctccccggcaggagtcaaaacatcgagattcctaatctttattcttttatcaagattcacttttaatttccttagcgtgcctgtcctgcacactttgtatagaaatatcaaaaaatgttcaagaaattaaatgtaaactcaacaggttgcattcatcggatattggcctttataaaaattttctgatttcattttttacattaggccatattaaggatgttccgtttatccaaatgactctttttccctgttggcaacatggatttctttcatggttaccgtaaaattcaaatgaacaccccattgatttaaaaagaaaaaactaaccatactgttcgattgttaaccaaatgaaattgtgaaatttcattcttatccgtgaattcatggtgttttcccacctaatctgattgtcagatagactacaaaaagccgaaaaaaacagaatgagagttgtctgatttaaccccgttacacattccgctcggtgtatgctgcatctaagacaaaatcctattactgattttataacaatcgcactaattatgctttgccctcccggaaatttcatttaatctgcgaaaagacattaacgccttaatgtaagaatactctcaataaaacgaaaaaaacgtgcaaataatataatccgttttggcgaaaacattctcacattgagagatagtgctataaaaaaagaaaaaaacggcaagcgaagatgagaattttacctaaagacagaaaatttcactgaggaggtgaggagagatgactcggaatgagagaaatatccctcccctggcgggagggattgagaaagcagtttgatcctcaggcctttttcttgcggccatacaccgcccaggtgatgaccacacacaagatatagaacaccaggaatactttcattgcccccgccggtgagccggtcagcgccagcgaggtaccgaatgcctggggaataaagaagccgcctgcggcaccgatcgccgagataaagcccaatgcggcggcggagtccgtcaccgcttcacgctgtgcgctctcgtcactgccgccggccgctttcacgcgatcgacagtgattttacggaaaatgacggcgatcatttggaaagtcgacccgctgcccagccccgccgtgaggaacagcaccataaagatgccgtagaaggcgatgaacgaaccaccctcgcccgccgtcggcaaggtcaggaacaacagcgcggcgaacacggccatcaccacaaagttgatcaacgtcacccgcacgccgccgaaacggtcagacagcgcgccgccgaccggccgcgccagcgccccgaggaacggcccgaagaaagcgtaatgcaggatcacgacctccggaaattgcgtcttcgacagcatggcgaaaccggcggagaaaccgatgaaagaaccgaaggtcgcgaggtacaacaaactcagcatccacaaatgcccacgtttgagcactggcagttgctggcgcagcgatgccttggccgccgccagatcgttcatgccgaaccaggccgccaaggtggcaaccagcaggaacggtacccagatccaggcggcgttttccagccataacagccccccttctgcctgatcttgcgccgtgccgccaaacagaccaaacaggctgaaagagatcgccagcggcgcgaccagttgcatgacgctgactcccagattccccaacccgccgttgagacccaacgcgccgccctgacgcgctttcgggaagaagaagctgatattggccatgctggaggcaaagttggcgcccgcaaaaccgcacagcagggaaatgatgacgaacacgctgtacggcgtgctgctgtcctgcaccgcgaatcccagccacaagcacggcaccagcaggaagcaggtgctgatagcggtccagcgacggccgccaaacagcgggatcacgaaggaatacggcacgcgtaaaatagcacccgagaccgacggcagcgctgtcaacaggaacagttgatcggtggaaaagttgaagccaaccttgttcaggttgaccgccacggcgctgaacagcatccagacgcagaaggccagcagcagacagggaatggaaatccacaggttgcgggtggcgatgcgatggccgcgctgcagccaaaaggcgctgtcttcaggatgccaatcctgaatcagcgcaccggttttctttgatgaaggcgttgcaagttgcgacataaaaacctcagacacgggggattattccgacaccctagggggcggccccggcggcaaagttgatgtatatcaacccgaatgcaagtagttggcggcacaaatagcgccttcatccccttaggggtacgttccggataaaaattaaatcatttataatcaataaattacaatcaatcgcttcgtcatcctcaccgcttcgccgccccgctggaaactaatgggtacttcattcgaggtatggggttatgctcagggataatcaaaaatacggctgaatcgtgacttgtttaccccgtcgccgccctcgcccctgagcttcagcggcgccaaatgccaggaacccgcgcttatgaaacgcctgttggccccgctttcgatcgtgaatcaggtcgccctgctgatgttgctgtcgggcattctgggcgtggccggcatggggatttccgcctggatgtcgcaaagcattcagggcaacgcgcatgccatcaacaaggccggctcgctgcgtatgcaaagctaccgtctgctggcgcaggtgccgctggatgaacggcatgaagcgttgatccgcgaactggagcgcgacgaaaacagccccgacctgcagcgttcggtggagcaggaagggttgacgcaacctttcgacaccttgcgcgactactggcaacagaccctgcaacctcgcctgcgtagcgcacagcgcccggccgacgccgcgccgcaggtggcgcacttcgtgcagctgttggataagctggtctcggatatcgacaggcaaaccgagcgccgcctgctgatggtgacgctggtgcaggccggctttatcgcgctgaccctgctgctgctgatcggcaccacctgttacctgcgccgccggttgctgcatccgtggcggcagctggtggaaatggcgctggcggtgggccgtggcgactttagccgccgcttcgcgcagcgcggccatcaagatgaaatggcgtcgctcggcggcgcgttgaacaccatgtccgacgaactgtcggccacctacagcgggctggagcagcgcgtagccgagaagaccgcggatctgcagcaaaaaaatcagatgctgagcttcctctatcgcgccagccgcctgctgcacgccagcgagccattgtgcagccgcctgacgccgctgctcaaccaactgcaaatcctgacgccgctgcgcgccattcaggtgcggctgtatgaaaacgacagccgggagccgctgctgcagctgagcggcaaccagccgctgcggccggagcattgtcataatccggtgtgcagcgcctgcctgcacgacagcgaccgccagcatcccgacaacccgtcgctgagctggagcctgagtgacaaacttggcgactacggcgtgatcgtggcgcaacatgcgccgcaacagccgctgaacgatgagcaccgccagctggtcaacactctggtggagcaactgaccagcgtgctggccatcgaacgtcaggtagaccaccagcagcagctgatgctgatggaagaacgggcggcgatcgcccgcgagctgcacgactccatcgcccaatcgctctcctgcctgaaaatgcagatcgcctgcctgcagatgcaaggcgaaacgctctcgtccgccagccaggcgctggtgcagcagatgcgcgaagagctgaacggcgcctatcgccagctgcgcgagctgctgaccaccttccgcctgcagctgaccgaaccgggcctgctggcggcgctgcaatcgacggtagcggagttcaatcccaaactgggcctgaacatcagcctcgattaccaactggggccgcgcacggtgcccgcctaccaggccattcatctgctgcagatcgcccgcgaggcgctcagcaacatccttaagcatgccgccgccagcgaggtgagcattcaggtcatcaacaaacggggtgaagtgaccctgagcgtatgcgacaacggacgcggcctgccggccgaaacatcccgccccgaccattacggcttgatcatcatgcgcgatcgcgccaagagcctgcacggccgttgcgacattttaccgcgcagcggcggcggcaccgaggtgcgagtcagcttcacgccggataaccacgccatcgactaacggagacaccatgacgacagaaaccgccgccaccatcttactgatcgacgaccacccgatgctgcgcaacggcgtaaaacagctgattggcatggacgctcgcctgcaggtcatcgccgaagccagcaacggtgagcaaggggtcgcgctggcggagcagcacgatccggatctgatcctgctcgacctcaacatgcccggcatcaacgggctggaaacgctggatcgtctgcgccagacagacctgtcggggcgcgttgtggtgttcagcgtgtccaaccatgaagacgacgtcgtcagcgcactcaaacgcggcgccgacggttatttgttgaaagacatggagccggaggatctgctgaaggcgctgcatcaggcggcggccgggcagatggtgctcagcgaaacgctgacgccgatcctcgccgccagcctgcgggaaaaccgccccagcgccgatcgcgatattcagcaattgacgccgcgcgaacgggatattctgaagctgatcgcccaggggctgccgaacaagctgatcgcccgccgcctgaccatcaccgaaagcaccgtcaaggtacacgtcaaacacctgctgaaaaagatgaagctaaaatcccgcgtcgaggccgccgtgtgggtgctgcagggcaaaaacggttagtcgccgccgtacagcggcccggtttgcgccgggatcggcggcggcgtcagggttttgatcggcggcaggcccgcgtcatcaccggcggtcgccgtcagcggcggcgccactttcagctctatccagttggacgtcacgcgctgctgtttatcgtcctccagcgtgaccgatagccggtagctgttggcggcgcccggcgcgtcgtcccacggcggcacgatcgccgtccagccctgcggatcgttggcattgtgcggcggcgtcaggctcagcgcctgcgtatccccctgccaactgacgtgagaaatcccgttcaatgccttgatttccagcaccagcggcacggtttcccccgcctgcaggctccacggcggcgtagcgaggaacacctgcagcgttttgcgctggcggaactccagcaccggcacgttcttgcgttcgataggatcgtagcggctgccgcgcagcgacttggcctgcgccacatattccggcgaaatctgcttcaccaacggcaccccgagccgatagctcagcgccagctcgatctgatcctggctctgcccgcccgcgccaatcttatgcagcgccttcatcgtcaccagcggcaccggggtgtaattgagccccagctgcatcgcgcgcggatcgttttgttttttgccgctgccgaacagatcgacattatcgccgagatactgctcatagctgagcgaaccgccgatctggcgataaaacggcagatagccttgcgtcgtaatgtcgtaaccgcgcgccgggcggctgaaaaacacgccatcgccaggctgttgcgccagcgccgacagcgggtagtaatagttggtggagaaacgcaggtagtctccccaggcctccgcgccgacgctgccgcgattgcgctgccgggcgaaatcgctgtcgagcgccgtgttgtaccccagcagccagtcaccggcgatccagcgctgccccagcgcgaaattaccgagcgccccggcgctttgctgcagccagccgatctggctgtaggtcagcaatccgtcgacgtcgtacagcgggctgaataactgcccgttgctgccggtaaagtccccctcaccggtcatcttcagcgataatcgggcggtgcccagcggcgacaacagttcctgcgcctgctgttgcaacgcgccggtcgcctggcccagcagataatcctcggcgcggctgcgcatctgctgacgggaaacgttattcagatctttttcgccgaactgcttggccatctcggcccactgcttctcgcgcgcggcgtcatcgggcgcgccgcccagttcgggcaaattcgcggccggatctgcggcggcctgtgcggaagagacaacgctctccggcgccggcggggattcggcgcaggcgggcgccgcgccggccagccacaccagcgccccggccagccacaccgcctggcggctgtgccagcgtcgttttttggttttgatgagtcccgcctgaatttcgtctttcatggcaccgttggccccctccctcctggagcaggccaacccactgctttgctgtcgcctttcccgcggcagatctggaaaccctacgccccgtccaggccggggcgcctctcccttaaagcctaacggcttgacgaacagaaacaataggataaaccccaatcactctccagtgacgccgtcacttacgccctttaccgatccattccggccgccaggtgaattcacaccatttcagcaccgattttgccgataaaaagcgcaacaccccgctgttgcgcgcctccgcgcatgacattgcctcactctgcaatacgtgaagtggcgatgcgtacaactgcgcattcctcacagcccaccgcatttcaccccgatgaaatacgcattttgccgttattttaaacatccatttcacgacttatggagccccgatgtttctttccttactgtggcccgcgctgtttttcaccgcgctgctgtcggcaggtgtggtcgccttcgcgctcatcacccggttggagcgaacggcggccgggcgcgccaacccaccgcaattgcgccgccgtagcctgctgctgacggccttcggtttggcgttgacggcgctgcccttcgacctgccggcagcacaccggctgtggttgccgccggctgcggcgctgctgatcgcccttgcctggctagactggcgccaccggtggttgccggaccgattaacccagccgctgctgtggggcggaatgctgtgcaatcttgacgctcgctgggcgacgctgggcgacgcggttatcggcgccgccgccggctacggggggttgtggctgctcaacgcgctttatcggcaggtgcggcggcgtaacggcatcggccagggtgatttcaaactgctggcggcgctgggcgcctggctcggttggacgatgctgccgctgctggtctgtctggcggccatgttcggattaggcatggcattgacgcgcagccgccgcaaccgccgcgcctggcgaacgcggcaacctttcggcatcgccttggcggctgccggctggctgttgctcttgatggacgccggccagaacgcgccggcgttattcggttagttcttcagtgtctcgatcagccgattgagcaatccggccacttccgcagtgctggccgttgtcggattggccagtggctggatcactgcgagcctggtggtggataacacctcatcgctgcggatttccaacgcatcggcgggtggcgagctcaatgaaacgccgtccggccgccagtagctgccgcgcgtagtctgcacctgataactgccaaagccgaaatctttctcgacgcggtaatatatttcgcagcttaacggcccggtgcgccgcaacataaaggcgcctttcgcgctatagctgcctttattgacgacaaaggcggtcgcctgcgaagacagatcgaacgtgatatataaatcgcacgccagcaccttggtgcttacgccctgttgaagagtaatgcgcgttgtaggttgccgatccggcgcggtcagggtgcctaaaaaagtccacgattgctgtttcgagatattgcgcggcaaatggttgctggtggcggaaggggcaattccccgctcgcccagactgtacatcgcttcgaccccgcttaaaaacgacgtaacgtcgacggtgcttttgccggccaccgggacgccgccgttgtatacgttactgaaggttacctcggtattattgctgcaggcggcgatcgccgccgggaacggcgtcttcgaaccgctgtaaagagtcaactgaccgatgtcccaacgagattcgttgatgaatcggcacaacacgctcccgctctccacattctgcgcatcctggatattgatattgcctatcgtgccctgggcaaagttggtggacaacacgctgacattggcggcgcgctgcgtgttgcggttctcgcagcccaacgaattgatcgtgccgttaaaatctttgaacgagtagatatcgccgatacagtcatccgcagccaacgagccgatagtagagtaaaaccctgaaattctgaacgcagtccccttggcgcgagcggcgtagaggccgtctataaaattggtggtgccggacttgtccatccacagcaccccatcgcccgggcgattggcgtttgcctccatctgcacgttcaccagccagttaatgaacatatcgcccgagacaaacagcgaataaccgccgaccttggtgtagatgtcgcgaatatcaaacttcgtcatattgcgatcgctgaaccacacgccgtgagtgtcgtctacgccagtatcatcccgcaacgtcaagccgtgcagcgtcagattggcgaagcctttcaccacgatcaccgctttcttcgtttcgccctgttcgttggtgtaactgctgtccgccgtcttgacaattttggtcgcccgtcccaatccgaccacccgcaaaccgatgccgccgtagatgtccgttgtcgtctgaatgagtacgtgtccggcgaccgtatacacccgcttcccaagggacagcgtaccgccggcttgcagcgccgccgccgccgctttgttgatcgccggcccccagttgcttccgtcgctgtcctgataaaactgttccggcgtaacaacctcaccggtggcgatcaaggttgctgcgcgcgctcctgaagcgttttcgttattgtccataatatctcctgacgtgatgtgtccgcatcattgcggacggccgcggtgaaaggcgtcaacaacgccgcctttcagtgccaatctatcaccgtcatatgagcgcgttatgaaatttcattttatttcaccctgacacaacatctcgcgatccgaggtagcaatagccagcgatttcactcgccgttggcctttggtgcgacagaaagctcggacaggcccgctacttgctgacccgatccagatacagcatgctgttggcgatatccaaccgggcaccttcgacgttgtcccgcaatgccaccagcgtttgcccctgcagcgccaccacatacggcgaactggcctgcagttcccgttgcaacgcgacgtaacgtgcgctgcgcgcggcgctgttcccttccgcagccgcggcgcgcgtttccgcgctgatggcgggaatgttccactgggtgcgccaggccagggttttcggcccaccgggcacgttataggcaaaggcgctggcgttggtgttcggatccaggtagtcggcgccccagtaggtgaagatcgcctgaaaatcgcggccgcgcatcttgccccacagatcgctttctaccaccggatggatatccaaccgcagcccggcctgcgcaaaactggcctgcagcgcctgcgcgatgtcggtatacggcggttggttgatgacgataagatcgatgcgcgtgccttcagcgatgccggcatcgcgcaggatctgtttggctttgtccacgtcgagcttaaacggccgatcgtcgagtgccccgtccaatccctgcggcaagaaggcctgatgcacgcgatattgccctttcagcagttgctcggcgatgctctgataatcgaccagccagcgcgccgcctgccataacgccggattgcccagcgccggattgtctttgctgccggtgttgaaaccgaggtaatagatccggggcgcatcggcctgctcgatgcgcacgccagacgcgttacgcagtgagtcgaactggtcagcccccagatcgtaggccacgtcggcatcccctttcagcaacagcaaacggcgggtaccggcgtcgctgacgttcttgaacaacaccgttttcaaccttgccggcgacggagcgtagtcattacggccaaacagcagcgcttcatgcggcacatagttgttcacccgatacgggccgccgccggcggaatggctgcgcagccagccgttaccgtagtccccctgctgcgcgtgctcgttcaacagcttttcatccacgatcgaagccacattcgccgtcagcagccgcagcgccaactcgctgccgatgttggcgggccaactgagttgcacctggttatctcccaccttcttcagctgttgctcaacgttatccggcgtccagccaaactcgccgagaataaacgacggcgccttgttcagcttcaccgcgcgaaccagcgaaaaaatcacatcttctggccgcagtgggttgccggaagcgaaacgctgctgcggtttcagggtaaaggtcaggctgcggccatcggcgcccgcttgccaactgcctgcggcgtccggcgccagcttttgcggcgcggcgcgatccggcgccaccaggcgctgatagaggttgaccagattggccgaactgacggtttcaaagctctccgccggatcgaggctgataatgccctccaacgaactgaccactaccaaggtatcctgcggggtggcagcctgcgcaccaaaagcggccgccagcgcgccatacaataaggttggaattaaccgtttcatcgatacactctccacaatcacgcggttgcgctgtttttcgagtgtagggggtaagaattaacagaagaacgacgataaattgctttatttattaccaagatggatatgcccgccgcgttggcgggcacaggtttaaatgctgatgcggccgtgcgccattgccaccgaacgatcgcacatatggtcaatcacgtccgcatcgtggctgaccagcaccatggtcagatcgcccgcctgcttcagctcgttgagcagattgaggatctccgcctgcaccgacatgtccaacgccgaagtcggttcatccagcagcaacaacttaggccgcagcaacaatgcgcgcacgatcgccacgcgctgccgctggccgcccgacagctgatgcgggtagcgatccagcaggcgcggatccaaccccacctggcgaaagcccgcgctgatcttgcgttcgatatcgctttcctgcagcagcttgagcggctccgacagcgtacgcaacagccggtgcttggggtgtagcgaagcatagggatcctgaaacaccatctgtacctcacgccgcagctcgccggtaaatgcctgccccggttgcagccgccgccccagcagctcaaaaccgccctgccagctgccattcagcccggccagcacccacagcaacgaggacttgccgcagccggaaggccccaccagcccgaaacactcacccggttcgatgtgcaggttaacctcatgcaccacggtgcgcagctcgtagccctggcggtgactgacgctcaggttctccagtgcgattacgctcatttcaacgtctccaacagcgcgcggtccagcaccggcagcggtttgccgcgcgtctcgcggctcggccggcacgcccacagcgtgcgagtgtaaggatgcgtggcctgcgccagctctgctgccggcagttgatccaacagctcgcctttgtacatcaccagcacccgctcgcagtggtgcgccacctgctgcaaatcgtggctgatcaggatcagccccatgttgcgttgcgccaccagattgtctatcagttgcagcacctgatcgcgcatctggtgatccagcgccgaagtcggttcatcggcaatcaacagctgcggatcgttgatcaacgcaatggccagcatcacccgctgccccatgccgccggagagctgatgcggataacggccccacagcgccgccggatcgggcaaccccaccgccgccagcatctccaataccttttcacgccgctcggcgcggctcagcttggcatgcagcaccagcggctcctccacctgacggccgatcggctgattgggattcagcgcatgtttgggatcttgcatcaccatcgccacccggtcgccgcgcaggcggctccactggcgttcgctcaggcgcgtcaagtcttcatcgccgagcgtcaggcgctgcgcctgcagctgcaacgtcggcggcaatagccccatcagcgcacgcgcggtcaacgacttgccggaaccggactcgccgaccagcgccagccgctcccgccccatgctgaacgagatattcttcaccagcgccgccggctgcggccccggcacgccgatcgccagccgttcgacggtcaataaagtgttatcagtgcccatgacgaggatccattttgtcgcgcaggccatcgcccagcaggttaaacgccagactggcgaacaggatcgccccgcctggtgcggcggcgacccaccattggtcgaaaatcactttactgccttcggccaccatcgaaccccattcggcggtcggcggcgcgacgcccatgccgaggaaccccagaccggcggcggacaggatgatgccgcccaggctcagcgccgcacgcaccaccgcgctcggcaggcataaaggcaaaatgtggccgaccatcagccgcaacccgttgataccctgcatgcgcgccgccgccaggtagtcactgcggcgcagcgccagggtttcggcccgcgcctggcgggcaaaggccggccagctggtcaatgccagcgccagcgcgccgttcatcagccccggccccatcaccgccacgaacgccagcgcgatcaccagactcggcagcgacaggaaaatgtcggtcagacgcatcaaaatgcgctcaacccagccgccgaggtaaccggcgcaaatgccgaccagcaggccgatgggaatggtcaacaccagaatcagcgacaccaggatcagcgtcggccgcgcgccgtaaatcacgcgggagagcaaatcgcggccaaagccgtcggtgcccagccaatgtgcagccgaaggcggcagtaaccgcagctcgatatgctgcagattgggatcgaaaggcgccagccacggagccagcagcgcggtgacaagcaggatcgccaccagcgccgcgcccagcgtcagcgtggtcaaccgccgaccgcggcggtcaccgacggctggctcgctttgcggttcgtgttcagagagatattggctcatcgagttcgcggatccactaaataggtcaaggcgtcggccagcgcattcaacagcacgaaacaggtgccgatcagcagcgtggcaccgaggatcgccggcgtgtcggcagcaaacagcgccgaggtcaggtaacgcccgacgccgggccaggcgaacaccgtttcggtcaataccgcgccctccagcaggctggcgtaggagagagacagtacggtgatcagcgtgccaagcacattgggaaacacatggcgcagcagaatgcgcaggcggccggcgcccttggaacgcgccagcgtcacgtattccttgttgcactcttccagcatcgccgcccgcagcagccgggtaatgcccgccatcgacagcagcgccaacgccaccaccggcagccacaggtggccgatggcgttgtagaacatttcacgatcgccggacagccagctgtcgatcaacacgaaaccgctgcgcggctccatgctgtacaagtaaatgtcgtccagccgccccggccccgccgaccaatgcagcgtggcgtagaacagcaacagcccgagcaggctcagccagaaaatcggcaccgaataaccgatcagcgacagcagacgcgccgcgttatccagccagctgcccggtttgagcaccgccagaaacgccagcgtaatgccgccgagggcgccgaggataatggcgcaggtggccagctccaccgtcgccgggaaggtacgcaacagatcgctcaacaccggctgcgcggtaatacgcgaaatgcccaaatcaccgtgcgccaggtgcaccaggtaacgccaaaattgcaccggcagcggctgatccaaccccagctcgtgccgcacctgcgcataggtggcttcgctggcgtgatcgcccgccacctgcagcgccggatcgatcggcgccaggtgcgacagcatgaaggtgaacagcagcaggccgagcaacgtcagcgccagagacagcgcgccgccgagcagccgcccgccccagcgccaataccgccgggccgccccggcgccggcggacaggtcagcggccattacttgctgaccttgctgtagaacaccatgtcagggttgatgccctgcacatagcccttgaggttgtcacgcaccgcaatcaggctgcgcgcctgcaggccgatgacaaacggcgagctttgctgcacctgtttttgcagttgctggtagtctgccacccgtttggcggtgtcgttttccgcagtggcggccagcgtcagcttgctcagcgccgggatctgccagttggcgcgccaggccagcgtcttgctgccgtcttccgggttgtaggcgaaggcggcggcgttggtgttagggtcgaagtaatccggcccccaggaggtcagcgtcgcatcgtagttaagcgctttcaccttggtggagacctgcgaactgatgcccggcaccagttcgaccttcacgccgccctgagcaaaactggcctgcaacgcctgagcaatatccagatacggcggctgattgttgacgtccaggcggaaactgacgttgctcagccccgccttggccagtatttctttggctttctgcggattgaagctgtacggcctatctttgagcgcgcccagataaccgtccggcaggaatgcctgatggctctggaactgccctttcagcagatcgtcggcgatgccttgataatcgaacagccagcgcgccgcctcccagaacgccggattgccgagcgccggcgacgccttggcgttgaactgcaggaaataaagcgaagcataaggaatagccagcggtttgacgcccggcttgcccttcagagccgccatctggtctgcccccaggttgcgtgcgatatcggcatcgccctgctcgatcagcaaacggcgcgccgccggatcgggcacgtttttgatcaggatggttttcagcgtcggcgccccttccggcgagcccgggttggcgtccagcaccaccacttcgtgcggcacataggtgcggattttgtaagggccactgccggcggagtggctgttcaaccattgatgccccagatcgtcgccctgctggtgcgccagcgcctctttggcgtcgacgatcgaggataccggcgccgacagcaggctgagcacgaaggccgggctgacgttctcactccagctgatttttaccgtgtgctcgtccaccttgctcaggtgttgctccacgttcttcgcgttccagcccagctgcgtcaggataaacgacggttcgagattgagtttaaccacccgtgaaagcgagaagatcacgtcttccggccgcagcggattgccgctggcgaacctggcgtccgggcgcaggctgaaagtcaggctgcggtcgtcggcgccggcctgccagctgctggccagggttggtttaagatcgatgggattgtgcggatctgactggatcagacgttgatacaggctgttgaacgactgcaccgtggttaactcaaatccctgggccgggtcaaagctgaccacgtcatcgatagattgcgcgatcaccagcgtgttggccggcgtcgccgcctgtacgttaacgctggccgccacggccaaaaacagcaaagaaggaacgagcgctttcatctgaaactctccaagcggatggaatttataataattttgcgagtgtatgcgagcacgatcggcagctgaaggtacttaaatcactatagatattctttttatgtatatagatgggattttgattattagggcaaggattgcgcggccgatcgcactctcgcgacacgtcgcggcaattgcctactgtctttgcagcacgattcgcagcgatgaaagtcggggtttgagtctgtttcatcgggtgactaacgtgagctcagtcacccaaaggacgggcaaatggcaaaccatccatcagaaaatggctgctcactcctgcatgagagagcgatagagcaaacgctggcagacatgaacagcgtgctgcttgagtcgaatctgtttatgactcgtctgacggtacaagaccggcgctggcaaaaaggcagaaaaaacggccatacgttaaattggcgctctctgtttaaatatcatgtccaaatgccgatgagtttcgcttttgtctaccggcaaatagccagcccgctgagccgcgccggcttttgcctgtgccgttatctccaggcggagaacgttatcgaacttgtcgcgctggagaatttctccctgcgcgaaacgcaacatcccctgaaaggcaatatgctgcgcaactgcttgcaggcgctatatctgtatgggctgaacctgcaagagcaggggctgacgccggcgtatccgccggacatacttatcagccacgccattaaccatcacgtgttagcactgtatacacgtcaggccgcctttgaagtaatacccggcaccatgacatgtaaaaccagcttcaacgcactgaaaaagtacatacaatcgctggaaaaatacggtgccagatgtgataaggtgcgtataaataacgagcagcaaggaagccaaaatggaaaataaggatctgaccgaccccacgctctccattcaagagcaaaaacgcatcgccatcgagattttacgtcaataccatcgctgggagatggctaacccacgtccagccgaagaactcccggaatgggaagccatcggcccgttcagaaaaagcaagcgtcaccttatcgaacgtaccgatgactgaccatgcattagcccgcaagcgatcctgcagggcaatcccgtgttgttaaatctggtagtcaatcaccgcatccagctgcgacgagaagaccttgtctttgatttcggtcagcgacaacgtcgggttgcacagctgaataaagcgccaggcatagttgcgctgcagctggctgcgtttcaggcccagccagaccgtattgggttcaaacaaatgctcggcgttgaggctgaccaacccgcgatcgcgctctttttcatacgacatgtccgccagcacgcccacgcccaaccccagctcgacataggttttaatcacgtcggaatcttgcgcgctgagcgcgatgtccggcgtcaggcccgctgatttgaacgccgcatccagcttcgcgcggccggtaatgccctggcggtaagtgatcaacggcaaggtgctgagcatctccagcgtcacctgcggctgccgcgtcaactcgtgcccttccggcaccagaatggtgtgatgccatcggtagtaggggaacgccgccagcgactcgtcgctcatcagccgttcgctggcaatgccgatatcggcttcaccggcggccaacatcgaaacgatctcctccgggctgccctgattgagcaccacccgcacccgtggataaagcgcgcgaaactctttgatcacccccggcaggctatagcgcgcctgggtgtgcgtcgtcgcgatatgcagctgccccgaatcgttgctgctgaagacatccgccaggcgacggatgttgttcgcgtcgttgagaatccgttccgctaccaccagcagctctttgccgggttcggtcatgcccaacagccgtttgccgcggcgaatgaatatttcgatgcccagctcttcttccagctcgcgaatatgccggctaacgccggactgcgaagtaaataaggtattggcgacctcggtcaggttgtagttgcagcgcgccgattctcgaataatttttaattgttgaaagttcattcccgtctccctgttacttgcagtagcgtctgccatattgatacggagtcctgcggggctgaacaaataagaaataacctttacttatgcaatttaatgctaagtgaattatttatcgtggctctcggggggtgaggacgggggaaaatgatgaatggctttaaaaataatgagataaataaccatacaaataaagagccttaagtcatcatgcagaataaagttattaaatagaggtattagatatatgaaaaagggctcagcatgctgagcccttaagtgtctgctgccctgctaacgcctcaggcggtagcctcagccccgaaagcgccagggcggttctgttgcaaccactgctgtacatagcgcaccagatcgccgatgcaatcatcctgcatgccgtggtgtttcagctcgttatccagcgcaaacaggtattgcgcgttggtacccagcgggccgctggcgctggcgatcaatggcgcgatcacctggtggctggtgtctgcttcaaacaacgggtgctgcgcgttcatcacgaacaccagcgccgtgacggtctctccgccatccaactgcagttcacaccaggtcggcacgtagcagtcggtcaccatttcgcgcttccaaagcagctccagctcttcacgcagcttaccttccggcagacgaaacgccaatccggtggtctgaccgccctctttcagcgccagcatgcgccccggctgatgcagcgtgccgcgcccggcggtcaaacgcatgcagaacgcccgatgccagccctgcagcatggcgggccgcacttcttcagattcgaaaaccggattccacatcagcgaaccgtaaccgaatacccataccgggctgtgatccggccggcgcgataacgtgcattccaacgaggctgcgcgctgttcaggcgtcagcagcagcgactcctcaatagcgccaaaggcggttttgcaatccgctttttgcagaaaatctcgcgttaacactgttacaacctcccgggaatacgatttctcgtcctccctcgccactactgaacctttgcaattttattttttggtgcggaattttattaattcaataaccgcgccgattaataatgaccatattcttttcccgccgcgcaatcaagttgcaaagcggcgttaacgtggaaaagtatttgtactgagcagcaataatattaattgccgaggtcagcataacgtctgcgcgttttttaccggggcataaaagcgttactttttatgccagcgttcgtcgtcgcccttgcgatagctttgcttgaccgccgcccaggccaccttatgcgccgtctcctcccggctgtcgtcaccgcgccgatcgtcgggatcccggtattgttgccaggcgctgttgaacgcttctttatagatcgcctgcgcatgttccggtagcacatgctttacattgtccggcaagtcgctcgtgtcttggtatggcatcacgtcctcccgtgcgtattgcgtgaaccttaagcctagctcacacgcggttgcgcctcaatgagcaaacaattctcattatcaaacggcatggtatactcaccgccaaacgaactataaggagatcctcgtgactaccgaagcccctcgctcacgcgccccctacctgatcgccgtcagcgccgtacaggacattacgccgcacctgcgccgcatcacctttaccgcgcccgatctgcgctactacccggccaacgccgccgccgcgcacatcaaggtctttttgccgctcgccggtcaaacgcagccggatctgccgacgctgactgaaaacggcccgcgctgggctgcggatgccgtgcgcccgatcgtgcgcacctattccattcgcgccgtgcgcccggaacaggcggaagttgacatcgagtttgccatccatgaccaccagggaccggcggtcgactttgcgcgtcaggcgaaagccggcgataaaatcggcatcagcaatccaggcggccccaaaccgatgctgccggccgccgacttctactgcctggcgggcgatccttcctcgctgcctgcgttggccgcgctgctggaaaacctgccgccgcacggcgccgggcgcgctttcatccgcgtcgacagcactgccgacgtgattgacctggaaaaacctgccggcgttgaggtgaattggatcgtcggcggcacggagaaaaccgacgaattgatcgctcggttccgcgcgcagtccctgccgcagggggaagcgcacttctggctcgccggtgaagatcacctggtggtggagctgcgccgttacctgcgccgcgaacgtcaatgcgatcgtaatcgtctttatgccgtgccttactggcgtgaagggctaaatgaagagggataccacaataaacggcatgaaatcatggataatattgacgactaacggtcgtattttccttgattaaccacgcactaaataagtaaacacgacttttctcaaatctaacgttgtaaattgacgttattgcgtaaaagtaagtaaataaaaccgcactccgtgcggtttttttgttactctgatcacataaagcaagcaattgctttctcagataaaaacaacatcacaccggcgccgcgggtgtatcctaatataaaatacctactggaaacgcagagttgccgcatcacggcgaccggcgctgacgggctacgctgtttgagaaggagtgccaccctcatgaagtcgcaacacgatcctggccgatccaccaaatctcgccacaccgaatactcgctgatcttccccatcgccgcgctggtggtgttgaatttatggggcagcaccgctaactttccgctgatcgtcggcatcaatattctcgcgctggtggggatcctcagcagcgccttcagcgtggtgcgccacgccgacgtgctcgcccaccgactgggcgagccctatggctcgctgatcctcagcctgtcggtggtgatcctcgaagtcagcctgatctcggcgttgatggccaccggcgacgctgcgccggcgctgatgcgcgacacgctgtactccatcatcatgatcgtttccgccggcctggtcggcttcgcgctgctgctcggcgggcgcaagttcgccacccagtacgtcaacctcggcggcatcaaacagtacctgatggcgattttcccgctggcggtgatcgtgctggtgttcccgagtgcgctgccgggcggcaacttcagcaccgggcaagcgctgttggtggcgctgatttccgccgccatgtatggcgtattcctggtgatccagaccaaaacccaccagagcctgttcgtgtacgagcatgaagacgacgatggcgatccgcaccacggcaagccctcttcgcacagcagcgcctggcacgccgcctggctcatcgtgcacctgatcgcggttatcgccgtcaccaagttcaacgccaatccgctcgaaggcctgctgaccaaaatgaatgcaccggcgcagttcaccggtttcctggtggcgctgcttatcctgtcgcctgaaggcctgggcgcgctgcgcgccgtgttgaacaatcaggtgcaacgcgccatgaacctgttcttcggttcggtgctggcgaccatctccctgacggtgccggcggtgaccatcatcgctaccctgaccgggcagacgctgatcttcggcctgcaaacgccgcatatcgtggtgatgttgacggtgttgctgctgtgccagctgtcgttctcgaccggccgcaccaacgtgctgaacggcaccgcccacctggcgctgttcgccgcctacatgatgactatcttcgcctgatcaaaaaggggcgcactctgtgcgcccctgcctgcgttataccgagaagaatatcgccgcggcgatccccccgaacaaaatccacttgatgatgtaataaccggtgcggttccaggccttcagccgtttccccacccggcgaattgcatagatgtatttgaacatcttgttgacgccgccggtgcgatcgccctcttcattcggcgcggtggcggcgctcatcagattgcgccccaaccagtggttaaccgcctgcgcccagcggtagcgcatcggccgttcgatatcgcagaacaggatcaggcgattctgcccgctctggttttccgcatagtgcagataggtttcatcgaacatcaccccttcaccgtcacgccagctgtagcgctcaccgtccacctcaatgaagcagcggtcatcattgggggtaatcagccccaggtgataacgcagcgaaccggcgtaaggatcgcgatggcgcggcaaacggctgccgtccggcagttcggcgaacatcgccgccttgaccgaaggcagactgcgcagcagttccgtggtctgcgggcacagggtcatggcggagggatggctgtcctcataccatttcagataaaagcgtttccaaccggtcttgaagaacgagttgaaaccggcgtcgttgaattgatcggacgctttgatctgctggatctccatcagcttctgtccttcgtcgcggatggtttcccagttctcccgcagtaccgccagctcagggaactgctccggcttcaggtacggcgtagtcggcacgcgagaaaacagatacatgaagacgttcagcggtgcggtaaaggtggaatggtcagacagctgccgccacacgttgtagcgcacccgtccgcggtaatgcacatagacgacgcataaaataagcaaaagcagaatgatgtatttcatgtttgaatcgcatcaaagaacccacacgctatgcgccgcgcggcgcacaccccagaaaatgtccttttggcgccgcacgcaaactgcgcgccaatctggaacccattaatcattaacgctaactcaacgaaaatctatacaaataaccacaataatttacacaaaggttaaacgagaggggaaatggggggcaagaaaaaggccttggatttccggtggttcttcgttcggttacatcagcatactttgctgtcactaatatgccgtgtgagctaacgccgacctcacaaccagaaaatgcaggcgttcacctttggtgagccgtcggccgtattggatcgccgtgacattttggactacacggaatgcgtcggtaacggtaaatggattgagccgcccgtcagcttttccgggctggcaaaaagcctgcgcgccgccgtgcatcacagctcacccatttacgtgaagcgcaatattttggcgagcacctacatcccgcacccactgctatcacagcaggatttcagccggtttgtgctggattatctggtgttcggcaacgcctttttagaaaagcgtttcagcgtgaccggcaagctgttgaagctggagacctccccggccaaatacacccggcgcggcgttgacccgagcgtttactggttcgtgcaatcgttcgctgagccgcacccgttcgcgcccgacagcgtttttcacctgctggagccggatatcaatcaagagctgtatgggatgccggaatatctgtcggcgctcaactccgcgtggctgaacgagtccgccacgctgttccgccgcaagtattatcagaacggcgcacacgcgggctatatcatgtatgtcaccgacgcagcgcaaaacaataccgatgttgaggcgttgcgcgaagcgatgagcgactctaaaggcatggggaactttaaaaacctgttcttctacgcaccgaacgggaagcccgacggtatcaagattgtgccactcagcgaagtggcaacgaaggatgatttcttcaacatcaaaaaggtcagcgccgccgacctgctggacgcccaccgcatcccctaccagctgatgggcggcaaaccggagaacgtcgggtcagtaggtgacgtggaaaaggccgcaaaggtgtttgtccgcaatgagctgacaccgctccagcagcgcatcaaagaagtgaatgactgggtcggcgtcgaggtcatccggtttaaaaagtacaacctcgaaaacgacgacgaatgataaaccggccgccggattggcggcctttttatacctgccaccaaacgccctctcacgcccaccacggcccgctttctcgtatatgcccgcgaatcaaaccagcgcaacagaaagccaccacgacgcactgacgccgccaattctgataattaaatacatgcccgcgcgcaatgctatccccgccatgcctgcgcgcaatgctatccccgccacgcctgcgcgcaatgctatccccgccacgcctgcgcgcaatgctatccccgccacgcctgcccgcttcatgggtcggttttaatgcagttgcctgaaccaacgaaaggcgcgccagccagggcttaggagctgtaaaaaataaccaaactcccatgcaaaaacatgcaacatagatatgcaaaccgagagttgacgattttaaccctattggttaatttactctttttcattgaatggatattttagtcatgcatcttgacaacccggctcagacactgcgccagtttttattggccgtttgtaaagctgatcccaacaaaagtcttcgttcagcattgtgcttagcattaaacttagagaacgaaaacgtcaccgagtcagttttatgggaaaaaactgccaaaatcatgactcttacatataaaattgaagatatactaaacgattacttccccgatgaggatattacagccccaaactggcaaaagaatgtcaccgaattcttctctcaaatcaacattaataacccagtacatcattacagtaatgtaataaaaactgaaacatttaatgagcttggattgcttgccttactttttaaaacaaaaggagagataggaaaactagccaacgaagatattgatgatatacaacagcaattatccgaactaaaacaatcagtcattgaatctaatctcagccaagagctgcgtaaagacatactccactacttaaataatataattcgctcattagaggattactctataacaggaattgaacctgtcatatcctccatagaggcaacattgggacacgcctgtatatcacaaccttttcaagaggtggttaaaaacacagagattggcgctaagttgaagggggttttgaagaaatcactttctgctgtaagtagcgtggagggcgttgtaagtctcggcgccaatgctattactctaattgagcatttcagtaagtaaatgaccgtttaaatttttcacaaaaacgcgccaataacggcgcgattcttataaataaaaatcacttaccgcctcttgggaagataagaaattacaacaagataatgttttcattttctgacgattaccccacacaatttgaacaaacgaaacaaactaatcaccagtcaggttttcgttaatcataacctgctgtaaacgatgaacaaccacggccatatttattacctataaagaagatacaaattattataaaaaccatcataattacaatggcacctcactaacatccaccttgtaccctaaaaaatcagctttggcgataaacaatttgataccatttcgctttgaatactcctctataaaagccctcatatctcccgtcaagcgcgcaccaataatcacggcatcaatgcaactctcagctaaaataacggcatgtccaggggagtgtttataatgctctttcgtagagaaaaatttcagactcctgacttcctcttccttttcccaatccgtatgctttatcaatgagaactcagcactaattgtaactttttccgagcgtaatttttcaagtaaatgcttgaatatatctattttaggtggaatgtctgagtacactacatccgcgaactccacaccgcatttatttagcttttctttattatacacaaagcaaacacctttcatcccactcccataatacccccacatcaaacggctatcatattttttcgtaaaacatgcaatagccacgctttgatgaaactcatcaataataactttattgaattgctcaccccagtatttatagatatgatcgtatacaaaagaaagatcacccccaataaagcactcctctatcctacgtctattttcccttaagaatttcgtatctttaattattgtagcaatatcaccagtggatttttcctttaatgactcaaaatcaaaagaaaaaaacatttcaaacggatcatttaaactttttggctttgaatgccaaattacattattcaccaattcatttaccgtgtttacattatccccacgaaatctaaataagtgatactcactagacaatatcattcctgccccatactattcaatattaaaatcacgtgacaccccaaagattccattccctaacacttataacactcccaaattttgtgccaccgtccttcaacatcaccatctcatctagcaattgtcacaccactgccttcactaccgaaaccgcgccaatatgggcgcggcttcacggtgcaaagcttaaaagcgcgagaaattacctaaattttacgcctgttgccccgcatgcaatttcaatgaatcgcctcattacctcattggtcatccatgttttttctgtcaaatgccatacccaattaagcacaccttctgcagtctggcatgaaatcaacggaatattgtattcatatgaaacattaatcacgatataatcgtcaacaactttcacctgctcggccaataccctcgcatcttcagcaatcctagaggccatattgtcatcaaattcaatgataggcattattttttccttataaataaaaatgagttatcggtaatcaagtatacgttaccgatgggaatgagactttataactttactactattcagttatcttttcgacaattccagtattaatattaatgcgtgctgtaacagtttgggttacaataccaccataagcatttgtccctttaaatctggttttaaccactgcgtgtgggtctttcccaaggacaagatgcgacatcgtttcaacatgcttatacgatgaatcatcgttcatacttttcttaatcagcttttcaagcggacgatacgaaccatcccagccgctgaaatttccttgaaagacgtcaagattggtatattccgccagcgatttcgggtctttttgatagccagcatcacaccagccaagaacttcaccgagcggtagttcctctgatttggtgatgctgtactgactcaggcaggcatagaatccatcaccatcgtccgccggtatttccttaaatttaacgtaatcgctaacgatttggtgacggtctgcctgcggttttcttcggtactcgacaagcgttaaatccgcgtgttcaaacactgccggtttttcttctaccacttcggattttactgccacttcttgccgtggtaatgggtataaaatcgcactcaacattccgacgaacagaaaagaaaacccatatatagcacttgaacgtttccggctcggcattcttacccattgaggtttgattaaacccaacacgaacgccacaaaggcgacaaaagaaacaaatgaaagtattagctccaaaacaatccccataatgaattaattatcatgtacatactgcgtgcaatagtctcccacatgataacaaaacattcattagcagatgatgattattggctaaaacccggccactcaactatcggtggatatacaaacgactggtcgccaaagattactgtcgcccctcgagttaaggcttttagttcccaacgttcggcagtaatgcccttctgcgccagttcaaaccgtatttgcggaattcttgcccgttctgccggtgtcaaacgtgccgaagggacatcatttcgagactttttccgattccgtgcgatttcttggtgattatccttcggtgactgccctcttatcgcgtctctgagcgtcttggcgacgtccgcatcattccagctaacatccccgccctcaatcaaatttatcaccgccgtgacatactcaggcgttgctacctgcatatctggctcaggttctcgctgaacctccccacagttattgacaggactccgaggcgcgccagaggcgctttttaaagtcaaaggatcaacatcaaggtcaacggccttgcggacaatgcgccattctgttgttcgggtttcgtggatatgacccgcgccaaggtgcggtgcaaagatgccgacaaccttttgcacctcttcgtcataagcgttcagctcatcagccaccttgcgcgcgactcgaacggtctgcacgtcgcgcgggacgttagcgcctccctgtccagctatataggcggcaaaatttccagcgctggcagccgcgcgcacagcctcgacacgctcatcaaaagtttcagcaaggctgatgtggcgtaaacaggcggcccggcattctcgataagctcccatggtagggattccgatagtcttaaactgaggtatacgccatgttgacgcccatgaggtcaccgcagcggccatatcgcgtaacggtttgccggtatcgtggtcaatttggccgtcgagcgcataaccgtcgatatttttagcgatgtatttagcaatgtaccccgcagcgccgcctttattcatgtgcttggcttcaaaccgattctttgctgcaccgcgctcgtcaccgtcttccttcagcgcataccgacgcatgatgtcgactatctgctggcgctgtttacgctcgcagaacagcatcatatgccagtgcggcgtaccgtcatggtgaggttcaacgacacgcataccgtaaacgctcaggccgttgtctttaaacgcggtgcgcattttgctccagatgcgcaccagataacgctggccgtctttcggtgaaaaagcctctgaatcccaattgtggttaagctgtactttttcagccccttctttgctaacaacgcgcctagggtgatatttagacgggcaagaaaaaggccgccgaagcggccttttcagtagcgggtaggttaactgtaagcgttgagcgtgcgctggcacaaagcggagcgtacgcagtcctgtttttcaaagcggataacgccgatcatctcgtcctcttcgaagcgctccagggcatcgctgagaccggatttcacgccgcgcggcaggtcgcactgggtcacgtcgccgttaacgataaccgtcacgttttcccccaggcgggtcaggaacattttcatctggctcgcggtcacgttctgggcttcatccaggataacgaccgcattttcgaaggtgcgtccgcgcatataagcgaacggcgcaatctctaccttgccgatttccgggcgcaggcagtactgcataaaggaagagcccaaacggcgcaccagaatgtcatacaccgggcggaaataaggggcgaacttctcggagatatcccccggcaagaaaccgaggtcttcatccgcctgcaaaacaggacgggtaacgataatccgatccacctctttatggatcagcgcctccgccgccttggcggcgctgataaatgttttgccgcagccggcttcgccggtggcgaagatcagctgcttattctctatggctgataagtaatgaccctgagcttcggttctagcctcgatgggtgagctatcgcgcttgtctcgcgccatgccgatagactcgactccccccatttgcaccagcgaggtcacagactcttcttccagctggcgatgactacgagcgtcacgacgaataacgcgtttcgcttcacgacgtgctttgatcactgctttctgtctacccatagtggcaccttacagtttgtttcacctaccgcaacggccaggccgcgcgattatgtttcacacacgtattaggttttggcctcctccgagccaataagagccaagggacaaagtgaatcgacggcaacgcttaagcgctgtgtcttcacgggacaacgcggactgcatcaataaacgtggagtaaaaagtgatgagattcggtagcgataagggtgcggagttgccggtaaaagagagtcggagagagaaccctcgttacaacgagaaatcaggggagatgtgttattttttctttccagcccaaccaaggactttaccattagcgatccccgcagtgatatttacagcttcaagctgtgcaccgtgtgaaaactaccgccagatgattacagtataatgacattcaatcctgtcgcgttactaaaatgtaaaaaaattttatatgttttgtttttagttatcgctaaaacactatatcacgcgcgatacgtcattccataaaaatttttaacatataaatttcaaaggattacaattaaaaaccgcgaatgacactttggtttcctgattaaaatttgcacaacccaaaatcgcgggcggtgcgcactttttaatccatagaccaggtgtcgaattgacttttgacgctcaatcttccgtacggcaggcaaaacaaagtaaaacgaggcaggcgaacccgcctcgtcatttcggcttcaggccttgagcaggccgctggccagataatcgccaccctctttcacgcccggcaatacgaagaaatacccgccgccaatcggcttgatgtattcctccagcgcttcaccgttcagccttttttgcaccgtcaggaagcctttctccagatcggcctggtagcagacgaacagcagccccatttccagctggccggcattggagacgccaagggaatagctgtagccgcgccgcagcatcaggttgctttggctttccggcgtgcgaggattagccagccggatgtgcgcatccatcgggatcaccttgccgtcgggatcgttcgcgtagtccggctcgtcatgttcacgcttcatgcccagcggcgccccgctgtgcttctcgcggccgaagatggtttcctgctcctgcagcggcgtgcgatcccaaaactcgacgcgaaaacgaataatgcgcgccgcctgatagctgccgcccgccgtccacgccggctcaccgacgttgtcgccgacccacaccaccttatccatcagcggtttgtcgtcggttttcgggttcgcagtgccgtctttgaaacctaacaggttgatcggcgtctctttgcctttgctgcgcgccgcgtgcgcggagatgaacccctcccgcttccagcgcacgctgagcagatccggcgaatgcttaatgatgtcgcgcagcgcgtgaatcaccgtttcgttggtgttggcgcagatctgcaacagcaggtcgccgtgacaaagcgcggcgtccaacgcatcgttggggaagcgggtcattttctgcaaccgcagcggcttttgcgcctgcagaccaaagcgttcatcaaacagcgatgcgccgaccgagacggtgatggtcaggttgtccgggtaaatctccggccccatgatgccggaatcgagcggcggcagcttggcgtccacctccggcgccttaccgccgtgggtcaggaaggcgatgcgatcggtcagcagccggaacaggcgctccagccccgctttgtcggtcgccagcacatcgaacgccaccagcatcatcgccgcctgttgcggcgtcagcacgccggcctgatggcggccataaaacggctgtttctgccagcgctcatcctgcggcgtcgccaacggctccgccgcgttacccgccgcctgcgccaggcggctgccgcccagcgccagcgcgcccagccccagcccttgcagcaaacggcggcgcgaaggcgatgccgccccctgcgattgcggatgcggcccgttattcgggcctgccttgttgctcataaccgtatgcctcagtccagacccaatacgccgcgcagctgggaaagatcctccgccagcgtggtgatcggccctttcaacgcattgcgatcggcatcggtcagcttctcataggactcataaccctctttggtttggtacttcgccaaaatggtgtccacggttttgaagttggcgtcgattttgtccagcagcggcttattggccttaaccagcagcgggcgcagcagattgactatcttttgcgcgccgtcgacgttggcctggaagtcccacaaatcggtgcggctgtaacggtcttcttcaccgctgatcttgctggccgccacctcttcgatcagcccggctgcgccgcccaccaccttgctcggcgggaaggtcagttcactcacgcgtttttgcagctcaacggtgtcgtgatacagacgatcggcatattggcccatgtctttggtggagttgtcagcaaacagcgccttctccagacggtggaagccggtgaagttcgggtccgccgctttcttctcgtagtcgtcttcacgggcgtcgatgctgccgtccagatcggagaacagctcggcgatcggctcaatgcgctcatagtgctggcgggtcggcgcatacagcctgcgcgcctgctccacgttgccggccttcaccgcgtcggtaaacagcttggtctgtttcaccaacccatcgacttctttggtgacgtaaaccttgtattcagcgatcgggccgaccaggtccagcgcgttcggcttgccgtcggtggcgccgttggccgcggcggtgacagtcagtttgcctttcggattgctcagcagcccgcaggtcatgtcatattcgcccgcttccagcgtggcggtcattttctgggtaaagcccggcgcgatgttctcgcgctcttccaccaccatcacccctttcaggatttcccattcgacgtttttctggctggtgttgtgcaccacaaactgtgtcttgccggccgggaccgtcagttgcatcggttcgcactgcttgtcgttaaccgtaaccttgatctgcggcacgtccgccgccaaggcgtcgatgctcagcgcaaacgccgggatagccagtaatgctgcgtgcaacgccttgcggcgaaataacggagtagacatacgagattccctattaaacattaatgattgattttacgttgcgccggggccgctgccggctccgcgcgctgcggcaggaaaaagaaaatcagcgccgggatcagatacaggaagtagaccgccacttcgctgaccgtcggcgcttcctggtaaccgagaatgccttccagcagggtgccgaacagcgaatgggtcgacagggtgttgctgaaatcgaaggcgatgtcctggaagtggttccacaggccggcttcgtggaaggcgcggatcgccccggcggccaggccggcggcgacgaacaaaatgaacagactggtccatttgaagaatttggccaggtgcagcttcaccccgccccagtaaatcatcatgcccagcacgatggcggccaccaggccgagcaccgcgccgatcggcgccgcggcgcccacgtcttgctggaacgccgccagcaggaagaacaccgactccagcccttcgcgcgccacggcgaagaacaccatcgccaccagcgcccacccctgccctttaccggcgctgagcgcctgatcgatagccccttccagatgcaccttgaccgatttggacaccttacgcatccagaacaccatataggtgaggatcagcaccgccaccgccgccacgatgccttcgaacagctcttgctgtttctgcgggaactcgccggtggtctcattgatgaagatgccgagcgccagacacagtgccgcggcgacaatcacgccgatccacaccgcgcccagccattggctgcgctgcgtgcgcttcaggtagctggcgatcaggctgacgatcagcgcggcctccagcccctcacggaacatgataagaaagggaacgaacataactaatcacccctgaaaagaccgcggcggcagagaaaaccggctcgaaatgagccgcggcgagtatgtaaagaaacgtaaaatacaacgagagtgattatcattctggcaaaaagaaatacaagaggcacaagcgtgattttttctaatcaaatgtcgccaggtgttacagccgaatgacgggcaaacaggcaaaaagaaggggcgctctgcgcgccccttgccgactgacatcaaacggcgttataccgttttgtattcggcttccgcctgatcgaaacgttcggtcatggttgaggatggctggcggcccatcaggctcaccaccacgatggccagacagcccaggatgaagccagggatgatttcgtacaggcccagccattcgtactgtttccagacgatcaccgtcaccgcaccgaccagcatgccggccagcgcgccgttgcgggtcatgcgcgaccacattaccgagatcagcacaaccgggccgaaggcggcaccgaaaccggcccaggcataactcaccaggcccagcacgcggttctccgggttggccgccaaggcgatggcgatcaacgccactaccagcaccatcacgcggccgacccacaccagctcacgctggctggcgcccttgcgcaggaacgccttgtacaggtcttcggtgatcgcgctggagcacaccagcagctggcagctcagggtgctcataaccgccgccagaatcgccgacagcagcacgcccgccacccatgggttgaacagcaacatcgccagttcgatgaacacgcgttcgccgttctgcgacacgttaccggcctgatccgggttattggcgaagtaagcgataccgaagaaaccgacggcgatggtcccggccaggcacaggatcatccaggtcatgctgatgcggcgcgcgctgcggatggtgcggtgagaatccgctgccatgaaacgcgccaggatgtgcggctggccgaagtagcccaggccccaacccagcagcgacaggatggcgacgaagttcagccccttcagcatgtcgaggttggccgggttcttcgcctggatcaccagcatcgaggtatcgatgccgccgacggcgaagatcacgatcaccggcgtcaggatcagcgcgaaaatcatcaggctggcctgtacggtgtcggtccagctcaccgccaggaaaccgccgataaaggtatacaggatggtagccgcggcgccggcccacagggcggtttcgtagctcatgccgaaggtgctttcgaacaggcgcgcgccggccacgatgccggaggcgcagtaaatggtgaagaacaccagaatgacgatggccgagatcacccgcagcagcttgctgttgtcttcaaaacggctggtgaaatagtccggcagcgtcagggcgttgttgttggcttcggtatgcacgcgcagccttcctgccaccagcttccagttcaggtaagcgccgatggtcaggccgatggcgatccagctttcggagatgccggagaggaagatggcgcccggcaggcccatcagcagccagccgctcatgtcggaagccccggcggacagcgcggtcaccacgctgcccaaactgcggccgccgagaatatagtcatcaaagttgttggttgcccggtaggcaagcaggccgatcagcaccatcccgaaaatgtacaccaggaaggtcaccagcataggtgtgctcattgtcatttaattctccactttcattattattcgcgtttcgctccggccaagccggcgccggtaaacccacgcgcaatgcatttcactggccgccgcgccggaacgtgacgcagcctgcgagcgagtgcaggtaaaatagtttctgcccgtaattgttgaccgtcggttatcctagatgagcctttcatcaaccaacaagatatttaacaacaaagttacacaaagtttaccctgcgtcacatttgccgggctcaaaggttgcactcacgacaagcaaaatgagttgcaccttgccattacccttatataccgcagggtaaagcgcctgcgacgtaataaaccccgccgcattcgctcaataacgcaacattcatgccaactgcccgtgttaaaaaatcgatgaaactcacacttcgctcatcagcctgatttaacaaggttgcacaaagttgcaacatgcaggatattgtctgcattcttaacccacacatctcacgaacctatcccaacaggctttccggcctgctgtttgtctagcctgatgggataggttctaaacacaggagttggacaggcatgggcactaccacaatgggcgtgaaactcgacgaggcaacacgcgaccggatcaagagcgccgcgcagcgcatcgatcgcacgccgcactggctcatcaagcaggccatctttaattacctcgagcgtctcgagagcggtaccgatatccctgaaattccagcgctggccgcagcgggccagcctgaagcggacgacattatgccgcaagcgcaggaagagtcacaccagccattcctcgatttcgccgaacaaattctgccgcagtcagtcacccgcgccgccatcaccgccgcctatcgccgcccggagaccgaagcggtgccgatgttgctcgaacaggcgcgattacccgccgatcttgcacaggctactcataaaatggcctatggcatcgccgagaaattgcgtaaccaaaaaagtgcaaacggccgcgccggcatggtgcaaggcctgctgcaagagttctccctctcctcgcaggaaggtgtggcgctgatgtgcctggcggaagcgctgctgcgcattccggacaaaccgacccgcgacgccctgatccgcgacaagatcagcaacggcaactggcattcgcacctggggcgcagcccgtcgctgttcgtcaacgccgcgacctggggcctgctgtttaccggcaagctggtgtccacgcataacgaagccaatttgtcccgatcgctgaaccgcattatcagcaagagcggcgaaccgctgatccgcaaaggcgtggacatggcgatgcgcctgatgggcgaacagttcgtgaccggcgaaaccatcgccgaagcgctggccaacgcgcgcaagctggaagaaaaaggcttccgctactcctacgacatgctgggcgaagccgccctgaccgaagccgacgcccaggcctacctggtttcctaccagcaggcgatccacgccatcggcaaagcctccaacggccgcggcatctatgaaggccccggcatctccatcaagctgtccgccctgcacccgcgctacagccgcgcgcagtacgaacgcgtcatggaagagctttacccgcgcctgctgtcgctgaccctgcaggcacgtcagtacgatatcggcatcaatatcgacgccgaagaggccgatcgcctggagatctcgctcgatctgctggagaaactgtgcttcgagccgcagttggccggctggaacggcatcggcttcgtgatccaggcctatcagaaacgctgtccgttcgccatcgacgcggtgatcgacatggcgcaacgcagccgccgccgcctgatgatccgtctggtgaaaggcgcctactgggacagcgaaatcaaacgcgcccagatggacggcctggaaggctacccagtctacacccgcaaggtgtacaccgacgtttcctacctggcctgcgcccgcaagctgctgtcggtgccgaacctgatctatccgcagttcgcgacccacaacgcccataccctgagcgccatctatcacctggccggcaacaactactaccctggccagtatgaattccagtgcctgcacggcatgggtgagccgctgtacgagcaggtggtgggtaaagtggccgacggcaaactgaatcgcccttgccgcatctacgcgccggtcggcacccatgaaacgctgctggcttacctggtgcgtcgcctgttggaaaacggcgccaacacctcgttcgtcaaccgcatcgccgacgccaccctgccgctcgacgagctggtggccgatccggtcagcgccgtggaagcgctggcggccagcgaaggtcaaattggcctgccgcatccgcgcatcccgctgccgcgcgagctgtacggcgagaaacgcgttaactccagcggtctggatctgtccaacgaacagcgtctggcctcgctctccagcgccctgctcaccagcgccagccatccgtggcgcgcggaacctatcatcgacgccgaattggatcagggcgtggagcagccggtgatcaacccggccgagccgggcgatgtggtcggctacgtgcgtgaagccaccgaaggcgaagtcagccgcgcgctcgacgccgccgcggccgccggcccaatctggttcgctacgccgccgacggaacgcgccgcgatcctcgaacgcgccgccgaactgatggaaagccagctgcaaagcctgctgggcattctggtgcgcgaagcgggtaaaaccttcaacaacgccatcgccgaagtgcgtgaagcggtcgacttcctgcactactacgccggccaggtgcgcgacgacttcgccaacgacagccaccgcccgctgggcccggtggtttgcatcagcccgtggaacttcccgctggcgatcttcaccggccaaatcgcagccgcgctggcggcgggcaacagcgtgctggccaaaccggccgagcaaacgccgctggtggccgcgcaggcggtgcgcatcctgctggaagccggcattccgcaaggcgtgctgcagctgctgccgggccagggtgaaaccgtcggctcgacgctggtcaacgacgcccgcgtccgcggcgtgatgttcaccggctccactgacgtcgccggcattctgcagcgcagcatcgccggtcgtctggatccgcaaggccggccgacgccgctgatcgccgaaaccggcggcctgaacgccatgatcgtcgactcttccgccctgaccgaacaggtggtgaccgacgtggtggcctccgccttcgacagcgccgggcagcgttgctccgcgctgcgtatcctgtgcattcaggaagacgtggccgagcacacgctgcaaatgctgcgcggcgcgatggccgaatgccgcatgggcaacccggagcgcctgtccaccgacgtgggcccggtgatcgacgccgaagccaaaaccggcatcgaacgccacatccaggcgatgcgcgccaaaggccgcaaggtgtaccaggccgccaaaggcagcgcgcaggatgaaaaagagtgggcgcgcggcaccttcatcaagccgacgctgatcgaactcgacagcttcgacgagctgcaaaaagagatcttcggcccggtgctgcacgtggtgcgcttccagcgcaacaatctggacgcgctggtcgatcagatcaacgccgccggttatggcctgacgctgggcattcacacccgtatcgatgaaaccatcgcccgggtgaccgaacgcgccaaggtcggcaacctgtacgtcaaccgcaacatggtcggcgcagtggtcggcgtgcagccgttcggcggcgaaggcctgtcgggcaccggcccgaaagccggcggcccgctgtacctgtaccgtctgctggctaaccgtccggacgacgcgctgcaacgtacgctgcaccgccaggacgaagagcgcccgatggaagccaccgcgcggccgcagctgttgggtgcgctgcaatcgctggagaaatgggcggtcaccagccagcacggcgaactggcggcattggcgcaacgttatgcggaactgggccagggcggcaccgtacgtccgctgccgggcccgaccggcgagcgcaatacctatgccctgctgccgcgtgaacgcgtgctgtgcctggcggataacgaaaccgacgcgctgatccagctggccgccgtgctggcggttggcagctgcgcgctgtggccggaagcggaactgcagcgcaatctgttccgccgcttgccgaacgatgtgcaggcgcgcatcgccttcagcaaagactggcagcaggacaaggtcgagttcgacgccgccatctaccacggcgatgccgaccagctgcgcaccctgtgcgagcagatcgcccagcgcggcggcgccatcgtctcggtgcagggcttcgctcacggtgaaaccaacatcctgttggaacgcctgctgatcgaacgttcgctgagcgtcaacaccgccgccgccggcggtaacgccagcctgatgaccatcggttaacgcatcctcaaggcggcaatacattgccgcctgatttgctaaccgctacgcaaaccctgcacttgtgcagggttttttattgtccgcagcccggtcagccgttagcgtattaatcttcttgcctgagagtgtgtatggtgtgtagattaaggacaataacatcgtgaagagttcagaactgattgcgctgctggaaagccacggttgggtattgcggcgggtaaaaggcagccaccatcaattcaaacatcccgattttgcgctgatcatcaccgtgccgcatccaaagaaagatctcaagctgggcacgctgcggcagatacttaaagacgcggggttaagtgcgcttcacatcgccacgcgttaacaggagagaccatgttttatcccgcttatatccatacagaatcaaacggcagcgccagcggtttctttcccgacgtccctggctgctacttcgccggcaccagcctggacgacgcttttgccgatgcccaaagcgcactggacgcgcactttgagttgttgagcgaagacaatcaaccgctaccgcgcccgcatgccgtcgcagcccatcttgccaaagatgcgggatccttcgagggaggacaatggctattggtcgctatcaatatggataaatttgacggccgagccgaacggattaacatcacgttgccccatcgcctgttaagtcgcattgactctctggttcggcaacatccgggatacggcagccgcagcggatttctcgctgccgccgcgcgcaatgaattgttgaaagcggagtgaatgcagtcgggggaaacgcccccgacgccttattgattccggaacttgtcgaggaattgctgggtgcgctgatgctgcggattggcgaaaagcgctttggccgggccctgttcgacgatgcggccgtgatccataaagataacccgatcggccacgtcgcgggcgaagctcatttcatgggtgacgatcaccatggtgcgtttctcttccgccagtgaacgcatggtattgagcacttctcccaccagctcgggatcgagcgccgacgtcggctcatcgaacaaaatcacctccggctgcatcgccagcgcgcgcgcgatcgccacccgctgctgctgcccgccggacagccgacgcggataagccgcctctttgccgctcagccccaccttggccagcaacgcgcgagcgcgctgttcggcgctggctttcgcctcacctttaacgataaccggcccttcaatgatgttttcgagcaccgaacggtgcggaaacaggttgaagttctggaacacaaaaccgacctgctggcgcagcgcgcgcacctgatttttctgtttgctcaacggcttgctgccatcgatcaggatatcgccgacgcgaatggtgccggaatccggctcctccagtaggttgatgcagcgcaacaaggtggttttccctgagccgctcgggccgatgatcgccaccacttcaccggcatccaccgccagatcgatcccatgcagcaccgtctgacctttgaactgcttggtcaattgcttaacttcaatggcactcatgcgttactcctgatcctggcgattaacgtgggcttccagacggttttgcagtgcggaaagcagggtcgccatcacccagtaaatcagcgatgccgccaggtacatggtgaacacttccagcgtgcgcgaggtgatgagctgcgcctggcggaacagttccggcacctgaatggtagcggccagcgaggtgtccttcaccaggccgataaaactgttgcccagcggcggcaaggcggtgcgcgccgcctgcggcaggatcacccggcgcagggtttgccaacgggtcatgccgatactggcggcggcttcccactgccctttgtcgatcgacgaaatcgccgcgcgcagcgtttctgaggtgtaggcggcggtattgagcgacaggccaatcagcgccgccgggaaaggatcgaattcgatgccgaactgcggcagaccgtaatagatcataaacagctgggcgatcagcggcgtgccgcggaacagcgatacgtaaatgcgcgacagccatgacagcggccaaagcggcgaaaggcgcatcagcgccagcagaaaacccagcaacaggccgaacgccataccgcccaggctaagctgcagcgtcagtatggcgcccttcaataaaaatggcgctgaatccagcgccagttgaatactttcgtgcattatttagttacgtccgcgccaaaccatttctcggagatcttcgccagcgtgccgtctttttgcatctcggcgatcgcctggtcaatcgcggccagcagctctgggttattcttgcgcagcgccacgccggactcctggcgggagaatgccgggccggccaccgccagcgtatcgccggttttcttcaccagatccagcgccgccaggcggtccaccagaatggcgttgatgcggccgacgcgcagatcctgatacttggtcggatcatcgtcgtaagtgcgcacgtccacgccctgcacattctcgcgcagccattgctcatagttggtgcccaggccaacgccgacctttttgcccttcaggtcatccggcttggtaatggtgccttcgttgccctttttcaccagcgcctgaatgccggaaacggtgtaaggggtggagaaatcatatttcttcttgcgctcatcggagagcgtcacctgattgatgaccacgtcgatgcgcttcgaatccagcgaagccagcataccgtcccatttggtcgggttcagcttggctttcacgcccagatgttgcgccagcgcgttggcgaaatccacttcgaaaccggtcaatttgccgtcttccccctggaaactgaacggcggataagtaccttccagcccgacgatcagcgtgccgcgctgtttcacctgctgcagcaggttatcggcggcgtaggtttgcgtcgtcacaccggcggccaacgcaatacccaccacgcccaacaaccattgacgacgaactttcgcaaacatcataaacacccctgtatgttgtttatcttttttgatatcagcactttaacagtgcaaccgcccgcataaaggaatataaccttataaatatagttcaaaatggaataacacgcggtgtttacacctgcggatggtaggcgaacagcgccggtgcaccgccggtgtgaacaaacaggatgggaccttcgtcgcggaagcgccgctgggcgatgccgtcgatcaaaccggccatcgctttgccggtgtacaccggatccagcaataccccctcttgctgcgccagcaactgcaccgccgccatgccctcttcgttcggcatgccgtactgcggcgcgaagtaatcatcccacaacgcgatcggcgccagtttgtcaatattcagcgaacaggccagggctttctggatttgttccaccttcggcaactgatcgatcacggtgcgcgagacggtcacgccgatcaactcggtttcgggcagcagctgctgcagccccaccgccagcccggcgtgggtgccggcgctgccggacgccaccaccaccgaactgaacgccacgttgctgcgttggctctgttcggcgatttccaatgcgcactgcacgtatcccagcgcgcccagcgcattggagccgcccaccggcaccacgtaaggccggaagccctgcgcctcgaggcgcgtcgccagttccgccagttgctgctgcggatcgtgcagcgcttcgcacattaccacttcggcgttgaacaggccgagcaacagacggttgccgttggtcaggtagttttccgcgcgggtatcgatcgggttttccagcaaagcgacgcagtgcaggcccagtttcgccgccaccgccgccgtctggcgcacgtggttggattgaatggcgccggcggtgaccagcgtatcggcgccttgccgtaacgcatcggcggccaaaaactcaagctttctcagcttgttgccgcccatcgccataggcgtgacatcgtcacgtttaaggtaaatttcacggccgaggtaatcggagagacgggacagtttttccagcggtgtggcgacgccaaccagatccagacgcggaaattgcgccagttgttgttgcaggttcactacttccccccagggaatcgaatatcaacatctgataaccgatagatttagcagatgtgaactgaataatcatcctttatcacgggggaaacagcagaccccggcccagcggccggggaaagtctcagtagctgcgctgccaggcgagatactgatcgtacttgcgcagcgcaatgcggtagttgttgtgcgccgcggtaggcagatcgtcgatgatgcgctgatgactggcgctgttggcgaatttgtccgccgggtaattccgcgccaccagcatttcatccagccggcgcagccgcaccacgtactcgcgaatggtgctgtggctcatctcggtctgttcgaacagatactgcttgaacgccataatgtcgaaataactcgggtggctgttgcaggaaatctcgctgcaaaagcggcacagcgcggtcagctcgtgctgcacgttttgccagaccgcatcgtcgatcggctgatccatgcgcgcgatggcttctttattgattatcttgccgcgaaacaccagcgccatgcggtccaacagtttgccgcactgggagcaatgggtctggctgtgcttgtagtctttcaggtaacggctaagcggccgtttcttcaacagtattcctggcataaggggcagtccgattgtcgcatgagtcatcgagttgggggcggcgctccgccgtcaggtatcgttcgccagccgcgcgcgcagccgtttgatcgcctgactgtgcagttggctgacgcgggattcccccacgtccagcacggcgccgatctctttgagattcaactcttcctggtaatacagcgtcagcaccattttttcgcgctccggcaacgcctcgatggcgtcgatcacccgctggcgcaggctgccttccaacaggtgatgcagcgggttggcctcttcatgcccttccagcatcggttccgcgttctcgccatgctcctcgcgccattcgtcgtaggagaaaagctggctgttattggtgtccaacagaatttgacggtactcatccagcgagatgttcagcgtctgcgccacttccgtctcgctcgccggacggccgtaacgctgttccagttgccgcatcacctgcgcgacctcgcgcgcgtggcgccgcacgctgcgcggcacccagtcgcggctgcgcaactcgtcgagcatcgcgccgcgaatgcgctgcaccgcataggtggtaaaggcggttccctgtagggcgtcataacgctcaacggcgtttaatagcccgattcccccggcctgcaacaggtcgtcaagctccacgctggcgggcagcctgacctgcaggcgcaacgcctcgtggcgcactaacggcacgtagcgcaaccagagagaatttttgtccatcacgccttcggcggtatacagatcgctcactatgtcttaaacctgcggataagagagtcagcgctattatgcgtagggggcggaatgccaatcggctgaacagtcgcacaaaacgggctttatttgcgccatgtaataaccgcgcggtgcgcgagcataaaaaaaccccgccgaagcggggtttctttgcgacagttaatcgggagagacgattaacgcagcagggacaggacgttctgagtagactggttagcctgtgccagaacagaggtgccagcctgttgcaggatgttggcgcggctcatgttggacacttcggtcgcgtagtcagcatcctggatacgggactgagaagcggacaggttgttcacggtgctgttcaggttgttgataacagaatcgaaacggttctgtaccgcacccagggaagaacgcagaccgtcaacctgagacagcgctttgtccagggtagccagcggatcaggaatgtccactgcagtggtgcttgcagcaaatttcacggtatcagctgcaccgccagtacctgcagtgaaggttggagtcgctgaaacgtaagattttttaccgtcggtggcagtggtttcgaccatgtagatggttttgccatctttatcagaacctgataccagcttctcattcgccttcagaccagatgcgtcaactttagcatcgccaatggtacctgcgttgtcatacttgatagttgcgccatcagcgatctgagaaccaactttgttgcctttggtcgtcacattaaaggtatccagacccagctctttagcgtcgatctttttcagatcgatatcgatggtttcaccgtcgttagcgccaacctggatagtcagtttctgatcgctgctcagcactttcacgccgttgaagtcagtctgctcggagatacggttgatttcagacagacgctgagtgatttcgtcctggatggatttcaggtcgctggtggagttggaaccgttctgcgcctgtacggtcagacgacggatgttctgcaggttgtcgttaacttcgttcagtgcgccttcagtggtctgcgccagagagataccgtcgttggcgttgcgggaagcctgagtcaggcctttgatgttcgcggtgaaacggttggagatcgcctgacccgcagcatcgtctttcgcgctgttgatacgcagaccggaagacagacgctcaatcgcagtgcccagagaagactgagatttgttcaggttgttctgcgccatcagagacaggctgttagtgttgattacttgtgccattgtttgctttccttacgagtcagttgcgttcttcgcaacacggttaaaaggttcgggcttgtttgcccacggcgtcaaccaccgtcccctcaggtatcggccctcccctaacaacctttagcaattttttaaaattttttgtgcccgttgcaatggcggaaataacgcgctttttccctcctctattgcgccatcgtttttttgtttttttcggtaaactttttcaccactgggccgataacgcgtaaagcgaataaagtcataatcaaggagaattactcatggcaacgatcagttcattaggtctcggctcaggactcgacctcaatggcttgctggataagctgaccaaagcggaacaacagcgcctgaccccttacaccaccaagcaatccagctacaacgcccagctgaccggttacggcacgttgaaaggcgcactggaaaaattcgacaatctcagcaaagagatggcgaaagaagatttcttcaaggccaccaccgccacagaacacgacgccttcaagatcaccaccaacgccaaggcggtgccgggcaactatgtggtggaagtgaacaaactggcgcaggcgcaaaccctgaccacccaggcgaaagtcagcgaccagggcgctaagttgggcgctgaaggcgtgacagaccgctccctgaccattaccgccggcaacccgccgaaagaaaccaagatcccgctgagcgacgatcaaacctcgctggttgagctgcgcgacgccatcaacggcgccaaagccggcgtcaccgccagcatcatgcgcgtcggcgacaacgactatcagttggcggtcagctcctccaccaccggcgaaaacaacaagatttctctgcaggtcgataacgacgaccaactgggcgatatcctgaactacaacgccacccgcggcaccggcaccgccatgaagcagacggtcgcgccgcaggatgctgagctgacggtgaacggcaccgctatcaagcgcagcaccaactcgatcagcgatgccctgcaaggcgtcaccatcgatctgaaaaccaaaaccaaaaccgatgaaccgcaacacctggtgatcagcaccaacaccgccggcaccaccgacaagatcaaagagtgggtcgacagctataactcgctgctggacaccttcaacgcgttgtccaagttcaccccggtgaaaactggcgaagcgccaaacccaaccaacggcccgctgctgggcgacaacaccctgcgcggcattcagtcgtcgatcaaaagcgcgctgagcgcagcccaggacaacccggagttaaaaggcctgggcaacctcggcatttccaccaacaccaaaaccggcaagctggaaatcgacagcgccaagctgaagaaagcgatggatgagaagccggatcaagtcagcaacttcttcgtcggtaacggcaaagacaccggcatggccaccgagatccacaacgagatccagagctacatcaaatccggcggcatcatcgagaactcgaccaaaagcatcaacaccaacctcgatcgcctgaacagccagatcacgacggtcaccgccagcattcagaacaccatcgatcgttataaacaacagttcgttcagctggataccatgatgtcgaaaatgaacggcaccagtaactatttggctcaacagttcaagtaaccctttaacaaggtaaagaaaacagcatgtataaccgtagcggcactcaggcctatgcacaggtcagtctggaaagcggcgccatgagcgccagcccgcaccagttaatcgtgatgttgttcgacggggcgctcagcgccctgcttcgcgcacgcatcctgatgaaccagggcgatatcgccggcaaaggcatggcgctgtccaaagccatcaatatcatcgacaacggcctgaaaagtggcctcgaccctcagcagggcggcgagatcgccgaaaatctggcggcattgtacgactacatgaagcgtcgactgatgcaggccaacctgcacaacgacgaagcggcgatcgccgaagtggttaaactgctggaaaacatcgccgacgcctggcgccagatcggccctaactaccaaccttcgcaggacgccgtgtaatggaacgtcaacagcagctgttagccgcttatcaacaaatttatagcctgagcagccagatgatcgcgctggcgcaaaccgggcgctgggaggagctcgtcgagctcgaattcgcttacgtgacggcggtggagaaaaccgccgcctttaccgggcaagccggcccgtccatggcgctgcaggagatgttgcgcaataagttgcaacagatcctcgacaacgaaaccgagctcaagcgtctgttacagcagcgaatggatgagctgaagatgctgatcgaacagtccacgcgccagaacgtggtcaacaatacctacggccagtttcatgatcgtgcgctgttgctgggggaaccacaggtccgataagatcgacaatactgacgaaaatggattaaatagcactatgcgctattaccctcgggttacgttaggatattaatctatggcatttgaattattcagtttatgggtaattggtaaaatgcgcgcttcgagcctggctctcactttaatggataaacatcatcccgacacggacgttttctgttcagcaggaaattgatttttgatagataaaacacgccgctgtgtttcacggcccatggaaaaatgttgctccaacgctgatcaaagcgtaaagatattctcagataatggctgcgaaatgaatatcgatggaacgtacaattaatctctgtcctggaattggcgcctcagcgcacatcattcagcatactgaattattattcccttcagtctattttgagcaaccacatctgtatctgatacaacaaggccataagcgcgtacgctggcaacaacacgaagtggtcgctcatcccggcgagctgttgattatcgacggcgggcaaacggtggacattattaacggcccgtccgaagacggcgtattcagctgccagttgctgacctgcgatcccctgttgctcaccgtccaacctccggcggaggaaacgccggcgccgatgccgttcgaggccgtcctggcgctgcgcaacctgccctgcgccctcaagcacagttttgaaaccaccggtctggcgctgacgctgcggcaacgctttcccaccatcatcgtgcggcacaaaatgctggaaattctgctgtggctggcccaattcggcattcgctttattcacaacgaagccaaggatctgacgcaacgcgtgcgccgctgcctggcgaccgacccgcacagcatttggacggcggccaaagtcgcggaaagcctgtcgatgagtgaagtgatgttgcgccgcaaactgtcgatggaaaataccgcattgcgcaatctgatgatcgacgtgcgcatgagtagcgcgctggccctgctgcagtcgaccgactggccgatctccgccatcgcgcaacatgtgggttatgaaagcgcatcgcgtttcgccgaacgttttcgcaaacgcttcggtttcgcgcctaccgccattcgcggccatcaaaggattatggaacccggttctcagggcgttgaggcgatggtcgccggagaaacataaatagacgcgcaacaaaatggctttatttaacacaagtccctaacggttgtaacaccactgagatacgctaagcaacgcccatccgccgaacagcgaattaaatgatgcgtaatgaaaagcgattattttctctggcaataattttgttggggttgtggctgttagccttactgaatgaagaagagatgatgcgtttactggccgcacaataaaacggccaggctttttatcgtctggtcagacttcagtccagtttaaccagaacgccaattaataccgccagcagcgccaacattaaaatactgatcagacgccatctggattcgcttttcgtgctcattgaccggcctcgaataataaccctactaatcacgtcataataaacggtcacctgcgcattcaataaacctgacagcaccattttctgccctctattcggtacattagtcggttgtggaaccggccattagcgatgcgatacccacggtgccgcaagcgccaattttcccggcagctccgccaccagcttgtctaccgccagccgcaccttgagcggctggtaaggcatatagggccacacgacgttcaccgggaaactgaggctggactcaccgcgcatgatctccaccaacgtccccgccatcaagcgctcgcgcaccagccactccggcagccaggcaatgccggcgccggcggacaccgcatcgacgatcccctgcatgtcatccatcatcatcttggccggtggcctgaacggccgcagctcgccgttttcaccgcgaagctgccagggcagcacggccccggcatgcagataccccaccgcctgatgtcggcttaacgcctctaccgttctcggttcaccgcagcgctgcagataatcgggcgaggcgcacagcagcatgccgtgttcgcccaagcgacgggcaaccaggctgccgctgtccgccagctcgccaatgcgcaccgccagatcgaacccctcgtcgacgagatcgatcctgcggtcgctgaatgaaatctccagcgtcagtaagggatgctcattcgccagcgccgtcaacacgggcgcaatgcacaaatggccgaacagcaccggcaccgagactctgagccggccgctgacctgcatcttgccgctgtcgagctggttttccgccgcctgaatgtttgccaacgcctgccggcagtgctcatagtacagcgccccttcatccgtcaggctcaggctgcgcgtggtgcgcataaacaacatcacgccaagccgagcctcgagacgcgacacgattttgctgaccgcagagcgcgtcagatgcagtttctctgcggcggcggcgaaactgccgccttccgctacggcaacaaaggccggcagcgcactcagatcgcttttcatcttaatgttgccaatatggaatcaatttagtgaaaaactatcaccactggtgaacctcaagcaatgataacctgcagtcattccgaatccccggtgaaaaccacagatgaccgtcagaggacagcagcatgaaaaaaatactggtactcaaatccagcattatgggaaatgactcgcagaccaataacctgattgaccgctatctggcggcgcgtaaggcgaaaggacacgaagatcggatcgtcgaacacgatctgactgcattggatctgccggtattggacggcgagctgttcggtgcgttgcgcggcgcggaaaacatcagcccacgcgccaaagcggcggtggcgctctccaaccagctgattgccgaactgaaagagagcgatctgctgctgctcggcgcgccgatgtacaacctcaacgtcccgacccagttgaaaaactggttcgatttggtggctcgcgcccggatgaccttcaactataccgccacctacccggtggggttggtggaaggcgtcaatgcgctggtattcagttcacgcggcggcatgcacgccgggcatccgacggatgccgtaacgccctacctgcgttcggtgctggggctgatggggatcggcgacgtgcaatttatctatgccgaagggctggacatgagaccgcacggccgcgatcaggggctggcgaacgcccaccagcggatcgcggaattggcgggctgaagcaaatgcacggcagcattgatttgttataatataacaaatatgataatcgcgttgacgccacctcgagcggctgtcgacgctcctacatgacataaatgttttatcgcaccttcagccagctatttcgatagctggttttttttcctcggttggcgctgcggcttcagcattgtcggactggccgtcactctaaggtaacagcgccgagccaaatttcaccgaaaaatagtcggcacgttcatcacaccggcatattcatgatgtcctggtaggccgccaccagcttgttgcgcacctgcacgcccagttgcaaagagaccgacgatttctgcagatcgaccatcacatcgttcaggctgatgcctggcgcgcccagctcgaagtcctgcgcctgtttgcgcgccgtttgctgggtctcgctgatcttgccgagcgccgcggtcagttcgctggcgaagctgacgccttgcggcgccgcattctgccccatcttgccggcctgaaccgccatggtctgcatctgctgcagtaccccttcaatgccctgaatcgccatctggtcctcaatcctctcgtctcgccgggtgacgttttcaccctgcacttctccaatgatgcacaccctagcacagcgttttcggacctaaagcggttaattaactgcaaaaaacccggcttatcgggcaatcggaattgtctgataaggcgaataatggcctgcccagaaatgggagcgccgctatttagaagatatgtgtatcagggagtctgttttgtcacacaacgctaaccataccgttcatcagcctggcagggagctgctcagcggcccgtacgggatcgtgagcgccattgaaggacgagacctaaaatgagtgcttcgataaccgccggcgaaagccgcgacaacggcctgcaggccatctggaaccgtctgcgcgccaacccgaaaattccgttgctggtcgccgcttccgccgcgatcgcgatcgtcgtcgcgctgctgttgtgggtgaaaagccccgactaccgcgtgctgtacagcaatctgaacgaccgcgacggcggcgccatcgtcacccagttgacgcagatgaatatcccttaccgctttgccgagaatggcgcggcgctgctgatcccggcggaaaaggtgcatgaaacccgtctgcgcctggcgcagcaagggctgccgaaaggcggcgccgtcggcttcgaactgctggatcaggaaaaattcggcatcagccagttcagcgagcagattaactatcagcgcgccctcgagggcgagctgtcgcgcaccatcgaatcgctggggccggtgcaaaacgcccgcgttcacctggcgctgcctaaaccttcgctgttcgtgcgcgaacagaaatccccttccgcctcggtaacgctcaccctgcaacccggccgtgcgctggacgacggccagatcaacgccatcgtttatatggtgtcgagcagcgtcgccggcctgccgccgggcaacgtgaccgtggtcgatcaggccggccgcctgctgacccagtccgacggcaccgggcgcgatctcaacgcttcgcagctgaaatacgccaacgaagtggaaaacggcttccagcgccgcatcgaagcgatcctcgccccggtggtcggcagcgccaacgtgcgtgcgcaggtcacggcgcagatcgacttcgccacgcgcgaacaaaccgatgaacagtaccaacctaaccagcagccgaataaagccgccatccgctcacagcaaaccagcctgagcgagcagatcggcgggccgcaggtcggcggcgtgccgggcgcgctgtccaaccaaccgagcgctccgcctacggcgccgattgaaaccgccaagccggcggcgggcaataacgccaacgccaccgcgcaaaacgccgcgaccacccgcagcgcggcggccagcggcgtgccgcaaaatacccgtcgcgacgcgaccaccaactacgagctcgatcgcaccatccgtcatacccagcaaaaagccggcaccgtgcagcgtctgtcggtcgccgtggtggtcaactacctcggcgcggataaagacggcaaaccgcagccgatgagcaaagaacagctggcgcagatcgaagcgctggtgcgtgaagcgatgggctactccagcagccgcggcgataccctgaacgtggtcaacacgccgtttaccgacgctcaggtgaccggcggtgaactgccgttctggcaaagccagtcgtttatcgatcgcctgatcgacgcgggccgctatctgctggtgctgctggttgcctggctgctgtggcgcaaactggtgcggccgcagctgcaacagcgccaggcggcgcaacaggccgccctcgccgccgccaacgcccctgccgccaaagcggccgacagcaacaaaccgagcaacgaggagctggcgcagcgtcgcaaatcgcagcagcgcgtcagcgcagaagtccagagccagcggatccgcgatctggctgacaaagacccgcgcgtggtcgctctggtaatccgccaatggatgagtaacgagatatgagcctgaccggaaccgacaaaagcgccatcttgctgatgacgctgggtgaagatcgcgcggcggaggtgttcaaacacctctcctcgcgcgaagtacagctgctgagcggcaccatggccggcatgagccaggtttcacacaaacagctcggcgaaatactgaccgagtttgaagacgacgccgagcaatacgcggcgctgagcgtcaacgccagcgactacctgcgctcggtgctggtcaaggcgctgggcgaagagcgcgccgccagcctgctggaagacattctcgaatcgcgcgagaccaccaccggcatggaaacgctcaactttatggagccgcagagcgccgccgatctgatccgcgacgaacacccgcagatcatcgccaccattctggtgcacctcaaacgcggccaggcggcggacatcctggccctgttcgacgaacgcctgcgcaacgacgtgatgctgcgtatcgccaccttcggcggcgtgcagccggcggcgttggcggagctgaccgaagtgctgaacaacctgctcgacggccagaacctcaagcgcagcaaaatgggcggggtgcgcaccgccgccgagatcatcaacctgatgaaaacccagcaggaagaagcggtcatcgacgcgatgcgcgaatacgacggcgagctggcgcagaagatcatcgacgagatgttcctgttcgaaaacctggtggaagtcgacgatcgcagcatccaacgcctgctgcaggaagtggaaggcgagtcgctgctgatcgcgttgaaaggcgccgaacagccgctgcgcgagaagttcctcaagaacatgtcgcaacgcgccgccgacatcctgcgcgacgacctggcaaaccgtggaccggtgcgcatgtcgcaggtggagaacgagcagaaagccatcctgctggtggtaagacgcctggcggaaaccggcgaaatgatcatcggcggcggcgaggacacctatgtctgatcgcattaacaccctgccctggcagccctggtcgctcaacgatttgggcgaacagaaaccggctctcgagctgccgccattgccggatctcgaacttgacgatccgtcgccggacgcgcaggccgaattgcagcagcagctggcgacgctgcgcctgcaggcggagcaacagggccagcaactgggctatgccgacggccagcaaaaagggtacgaggccggttttcagtccggactggaggaaggccgtcagcaagggctgctggaagcgcagcagcagcaacagccgctgaccgcccactggcagcagctggtcaccgaattccagcacacgctggacgcgctcgacagcgtgatcgcgtcacggttgatgcagctggcgctgaccgccgccaaacaggtgctgggccagccgccggtgtgcgacggcaccgccctgctcgcgcagatccaacagctgattcaacaggagccgatgttcaacggcaagccgcagctgcgggtccacccggacgactacccgcgcgtcgagcagcagttgggggttaccctcagcctgcacggctggcgcctgctagcggacggtgaactgcatccgggcggctgcaaggtcagcgccgaggaaggcgatctcgacgccagcctggcgacgcgctggcatgaactgtgccgcctggcggcaccgggagaagtctgatgaccgcgcgtctcggccgctggctgagctctctggatacgctggaaaaacgcatcgcccgcgcgccgacggtgcgccgctacggtcgcctgacccgcgctaccgggctggtgctggaggccaccggcctgcagctgccgcttggcgcgacctgcctcatcgaacggcacgacgccggtgaggtgcaggaagtggaaagcgaagtggtcggcttcaacggccagcggctgttcctgatgccgctggaagaagtggaaggcatcgtgccgggcgcgcgggtttacgcccgcatcgcgccggaaggccaaagcgccggcaaacagctgccgctcggcccggccctgctggggcgcgtgctggacggcagcgccaaaccgctcgacggcctgccctccccggaaaccggttaccgcgcgccgctgatcaccgcgccgttcaatcccttgcagcgcacgccaattgagcaggtgctggacgtgggggtacgcaccatcaacggcctgctgaccgtcgggcgcggccagcgcatgggcctgttcgccggctccggcgttggtaagagcgtgctgctcggcatgatggcccgttataccaaggcggatgtgatcgtcgttggcctgatcggcgaacgaggccgcgaggtcaaagactttatcgagaacattctcggtgccgaaggccgcgcgcgctcggtagtgatcgccgcaccggcggacgtgtcgccgctgctgcgcatgcagggagcggcctacgccacccgcatcgccgaagatttccgcgatcgcgggcagcatgtgttgctgatcatggactcccttacccgctacgccatggcgcagcgtgagatcgccctggccatcggcgagccgccggcgaccaaaggctatccgccttcggtcttcgccaagctgcccgccctggtggagcgcgcaggcaacggcatcagcggcggcggctccatcaccgctttctacaccgtgttgaccgaaggggacgatcagcaagacccgatcgccgactcggcgcgcgccatcctcgatggccacgtggtgctgtcgcggcggctggcagaggccggccactacccggctatcgacatcgaagcgtcaatcagtcgcgccatgacgtcgctgatcgacgaagagcattatcgccgggttcgcaccttcaaacagatgctggccagctatcaacgcaaccgcgatctgatcagcgtcggcgcctacgcggcgggcagcgatccattgctggacaaagcgatgacgctgtatccgcagatggaagcctacctgcagcagggtatcttcgaacgcagcggctatgatgaagcctgtcaacagctgcagcagttgattgtttaacgtcacagaggcgcagagcgatgaaatcacaatcccccctgattaccctgcgcgatctggcgcaggatgcggtggagcaagccgcgcaacagcttggccaggtgcggcaggcgcagcaggcggcggagcagcagctgtcgatgctgctcaactatcaggacgaataccgccagaagctgaatcatacgctctgcgacggcatggacagctcacgctggcaaaactaccagcagtttatcggcacgctggagcaggccatcgaccagcaccgccagcagctgctgcagtgggggcagaaagtggatcacgcggtgaagcaatggcaagacaaacaacagcggctgaacgctttcgaaaccctgcatacccgcgcaatgaacgcggagcagcagcaggagaacaaacgggatcaaaaattgatggatgaattcgctcaacgcagcgcacaaaggaatatcaacccatgaatctgaacgccctgcccggcctggccttacccggcgacgccggcggtctgaccgaactgacctcggcgctggacgaaagccagctgtcgtccgcttttgcccagctgctcggcgcgcgtttcgcgcccgccgccgatggcaaacctcagccggccacgctgagcgcggacgaggagcgcgccccggccctgagccgcaaccagctcaatcagctgctggccaccttcggcgagcgcggcggcctgttgccgaacctgtcagcctcagccgacgcgccttcttctgaagccgttgaaggcgatgcgcccgccgccggcgataaaccggcgcagccgccgatcgtcgccgccaaagagctggatgccgcgacgctgcaggcgctgtacgccatgctgccggccgcgatcgtcgctcaggcgcaaccggccgaaggccaacggtcgctgccgatggaaaacgctgacgaggcgactgcgctgcagcccggcaacggcctgctgaacatcgcggcggccggtgataacaccgccgcgcgctcgtcggcggcccccgccccggcggtgacgggcgcgaaaacgccggctaccgatggcgacaacgctgccgcggcgacaacgcagccgaccagcggtgaacgcgcaaacgccgcacagccgctgccggcgagcgatgcacagcagcaaccgacgctcaatcacgctgtcgccctggccgccgccagcccgacgcaaacggccgccccggccagcgcgctggtaagtgcaccgcctacgccgcagctcaacgcgcagttgggcagcccggaatggcagcaggcgttgaaccaacaggtgttgatgttccaccgcaacggccagcagagcgccgaactgcgcctgcacccgcaggagctgggcgccttgcagatcacgctgaaactggacgaccagcaggcgcagctgcacatcgcctctgcgcacggccaggtgcgtgcggcggtggaagcggcgatgccgcagctgcggcacgcgctggcggagagcggtatcaacctggggcagagcagcgtgggcggcgagtccaccccgcaatggcaacaggcgcagcagcaggcctccaacggccaggggcgttccagttatgctgaacatcatggcgctgacggcgcagccgccgagggcgtcagcgcaccggcggcgctgcagcgtatggccagcgcggtcaacggcgtcgatattttcgcctgagccgccgcaaacgcccaagctggcacccatttgcgcgtctattcaggctattgcacgccacaatagacgcgataatacctttacatgtcatgcgtgcggctttgccgcgcgcgatgcccgccgcctcgccggccgcgggtggaacaacaggaattagatttcgctatgtctcagaactcccttccggcagcaccgaaacgcccccttctggtcatcctgctggtgttgatcagcgtcgtcgcctgtggcgccgcgggctacagctggtggctgctgcaacagcataaaaacggcgccgaaccggccgccgtcaaagaacaaccgccggcggcgccggtgttcatgccgctcgacacctttaccgtcaacctggtgacgccggacaacaacccggatcgcgtgctgtacatcggcctcacgctgcgtctgccggacgaaagtacccgccgccagctgaacgattttctgccggaagtgcgcagccgtctgctgatgctgctttcccgccaggaagcgagccagttggccaatgaacaagggaagcaacagttggtggcgcagattaaggatgtgctcagcccgccgctggttaagggacaaccgaagcaggtggtcagcgacgtgctgttcaccgccttcatactgcggtaatcactatgggcgatagcattctttcacaggcagagatcgacgccttgctcaacggcgacagcgcgggtgatgaacccgaggcggtggtcggcaaagagagcgaggtcaagccttacgatccgaacacccagcgccgcgtggtgcgcgagcgcctgcacgcgctggaaattatcaacgaacgttttgcccggcagttccgcatgggattgttcaacctgctgcgccgcagcccggacattaccgtcggcccgatcaaaatccagccgtatcacgagttcgcccgcaacctgccggtgccgaccaacctgaacctggtgcatctgaatccgctgcgcggcaccgccctgttcgtgttcgcgccgagcctggtgttcatcgccgtcgataacctgttcggcggcgacggccgcttcccgaccaaggtcgaaggccgcgaattcaccccgaccgaacaacgggtgatcaagcgcatgctgcgtctggcgctggacgcctacggcgacgcctggagcgccatctacaagatcgacgtagagtacgtgcgcgccgaaatgcaggtgaagttcaccaacatcaccacctcgccgaacgacatcgtggtcaccacgccgttccaggtggagatcggcgcgctgaccggcgagttcaacatctgcattcccttcgcgatgatcgaaccgctgcgcgagctgttgaccaacccgccgctggaaaattcgcggcaggaagacagccactggcgcgaaacgctggtgaagcaggtgcagcactccgaactggagctgatcgccaacttcgtcgatatcccgatgcggctgtcgaaagtcctgaagctgcaaccgggcgatgtattaccgatagacaagccggaacgcctgatcgcccatgtggacggcgtaccggttctgaccagccaatacggcacgttgaacgggcaatacgccctgcgtgttgaacatttgattaaccctattttgaatgctctgagtgaggaacagcccaatgagtgatcctaagcaaccgtctggcgaaggaaaggaatccgtagacgatctgtgggctgatgcgtttaacgagcagcagtcttcagagaaatccggcgcgagcaccgaaggggtgttcaagtcgctggaagctcaggatgcgctcggcagcctgcaggatatcgacctgattctggatattccggtcaagctgaccgtggaactggggcgcaccaagatgaccatcaaagagttgctgcgcctgtcgcagggctcggtggtggcgctggacggcctggccggcgaaccgctggatatcctgatcaacggttacctgatcgcacaaggtgaagtggtggtggtggccgacaagttcggcgtgcgcatcaccgacatcatcaccccgtccgaacgcatgcgtcgactgagccgctgatgaccgtcgccgcgcccgttaccgtgcaaagcacccaacaacccgccgcgccggccctgccggccggttcggtgttgatgcaggtcagcagcgcgctcggcggcattctgctgctgatcctgctggccggttggctgttccgtcggctggggttcgccccgcaggcgcgcaacaacaaactgctcaacctgcgcgccagttgccaggtcgggcagcgcgaacgcgtggtagtggtggaagtcgacgacaccctgctggtcttgggcgtcaccgcccagcagatcaccccgctgcacaccctgcccgccccgccgaaagacgaaggcgagaccaacgcggcgacgccggcggacttccgccaactgatgcaaaaagttctgaaacgcccggaaaaatcggcatgacctcgactcttcataccctcgtccgccgtccggcggtttggctccctgccgccctgctgctgatcagcccggcggcttttgcacaactgccggggctgatcagccagccgctggccaacggcggccaaagctggtcgctgccggtgcagacgctggtgctgttgacctcgctgaccttcttgcccgccatgctgctgatgatgaccagcttcacccgcatcatcatcgtgctcggcctgctgcgcaacgcgctgggcacgccgtcggcgccgccgaaccaggtgatgctggggctggcgctgttcctgaccttcttcatcatgtcgccggtgttcgacaaggtttatcaggacgcctatctgccattcagccaggacaaaatcgggctggaagtcgcgctggataaaggcgcgcagccgctgcgcgaattcatgctgcggcaaacgcgcgaaaccgatctggcgctgtacgccagactggccaatcagccgccgctggccggcccggaagcggtgccgatgcgcatcctgctgcccgcctacgtcaccagcgaactgaaaaccgccttccagatcggctttacggtgttcattccgttcctgattatcgacctggtggtcgccagcgtgctgatggcgctggggatgatgatggtgccgccggccaccatctcgctgccgttcaagctgatgctgttcgtgctggtcgatggctggcagctgctgctcggctcgctggcgcagagcttctattcgtaacccctgaccggagaaagcgagatgacacctgaatcggttatggcgctcggcaccgaagcaatgaaagtcgcgctggcgctggccgccccgctgctgctggcggcgctcatcagcggcctggtggtcagcctgctgcaggccgccacccagatcaacgaaatgacgctgtcgttcatccccaaaattctggcggtagtggccaccatcatcatcgccggcccctggatgctgaacctgttgctggactacatgcgcaccctgttcagcaacctgcctaccctgatcggctgaccgtgctcactttcgacagcgcccagctcaccgtctggctcagccactatttttggccgctgctgcgcattctggcgctgatcagcaccgcgccgatattcagcgaaaagcaaatcagcaaaaaggtcaaaatcggccttggcgggctgatcgtcatcctgatcgcgccgacgctgcccgccagcaatattcccatcttctccgccgccggcctgtggctggcgattcagcaaatactgatcggcgtggcgctggggttgaccatgcagttcgccttcgcggcggtgcgcctggcgggcgaagtgatcggcatgcagatgggcctgtcgttcgccaccttcttcgatcccagcggcggcccgaacatgccggtgctggcgcgcctgcttaacctgctggcgatgttgctgttcctcagcttcgacggccatctgtggctgatttcgctgctggcggacagcttccataccctgcctgtccaagcgcagccgctgaacggcaacggtttcctggtgttaacccaggtcggctcgctgatcttcatcaacggcatgatgttggcgctgccgctgatctgcctgctgttgacgctgaacatggcgctcggcctgctcaaccgcatgacgccgcagctgtcggtgttcgtgatcggcttcccggtcaccatgaccttcggcatcatgacgctgggcatgatgatgccgatgctggcgccgttctgcgaacacctgttcggcgaagtgttcgatcgattggcggcggtgatcggcggcatgaccttctgatcccctgtgcggccccttccttcccccctcttccgcctgagacaaaatggcaataaaaacgttttcttgggacaaaagcctgagaaacggcttttatccggattaaggttcaaatgtctccggcggcttgaataaataaaaccccgacctagaatagacccggtaacaaaaatatcgccacagcgcgtgagtctccgcagcgataatatacaaccattgattagagaaaaataaaataacgcagccacgcagagttaaatgcgcggcagattccttgcatcttaaataaatgcgtccggtgcccgccggctgcagggagcagcatcgatctttgctaaccataggagcgacatcatgattaaagcgaaaagcaaccgcaaagcacgccggttattcggtttgacccactggaaaagcaacaagtttagagtttccttcaccgagaccagcgatggcggaaaatggaaagtggtgaagaaaaagaaataatcacgcaggacctgtagcaaaattccgggttgcgcctctatccggcttctgcaacgtcattcgacgcggcgccgcatcggcagcccgggacccacactcatcactcgccggcaaaccgtgccggtgtactttattcttaggaagggaataacgcgccacatcaccctggctgctgcgttaaatttaaaaataatgtattaatgatttaatttactcacaccccttatttattcactgacaagaaaaatcgatttcccaccttatttccccagcgttatattgaaaacaaccttgctaccagtacgcggcaagcctcactaaaatataaacggtgtaaatatgaagataaagtttcagctgagtgatttattcatcagcggcatcgcccttttgatcatgagcactattttaaacacactgggtttttcctggggtttatttgctctgccgcctggcgtcgatagttttgtcatcatcccgtttaccttatttggctcattgaagttggccgagtgcctctataagccaatacgctggctgctaaatgagagccgcaaatctcaaatcgaaaataacaaccctaaaaataacgctaagtcgcgttaacaggagatcgacctatgctgagagaactgaccagagaagaaatgcaacggattggcggcgccggtgacggcaataacggcggcgaccgggatcgcgactatggcccaagctcctacggcgcgcaggcgaacggcttccagcctaattgggcggcgaaaggctatgggctatttcaggatccttgtaccggcgcagtggtgaccggcgccattgccatggccggcgccctggccagccgtaacggcagtgcaattggcactgcggcagcctcagccttcgtcaacataggcggtcaatgcactaaagggtccggcaacgatcgcggcgtgcctttccgctaacgcgtaagctgaatggggaacatgcagacaaaaaaaggcgcgtcactcagtcagtagtgggagaacgagcgacgcgccaaacgagtgcgcccggtttcaagaagcctccctccccgcggggcggagaaggcgttttctaagcgcactaaagggaaacccgtcgcggtcaggcaacgggatattgctcttaacgattcatctggaacaacgacatgccctgcatatcgctgaaggttttatacgacgcctgcagcgccgcctgctgcatgaaataagacgagatagactcggccaggtcggcatccgtcaacgcgctcatctggatctggttggtcatatcgcgctctttgccgatgctgtccagttgatccatctcctgcagctggctgcccagctcggcgcgcacgctcagcacgttgttgtaggagttgtccaggccgcggttggctttcgccagcgcatcgttcacctgttgcttggtggcctcgtcggcgccctgcagcgggattttcagcgcgttcagcgcgatatcgatgctctcgaatacgttgctgaccggcgcgctgccgtccggctcgggcttcgggttgctggtcaacgacatgaacaccgcgttgccggtatggccgatggtcatggtgcggttggcgtccactttctgctgaaccgtcttgtcgccgccctgatagctgacggtgccgccgttgtcgacgaacggcgccttgtcgttcacatacccgccgaacatatagcggccgttgccgtcggtgctgttggcctggttcagcagctgatctttcagcccctgcagctgagtggccagcgactggcgatcgttatcgctttccgtaccgccggcattgacgatcagcgccttcatgtccgcgatggtggaggtcgcgccggccaagaccgtttcttccatcgacacgttctgacgagcgaaggtgcgcgccagcgtgtactggctgttttccgcctgcgattgcgacaacatcaccgcgcgcgacgccgccagcggatcgtcggacgggttgatcacccgcttgcccgaggaaagctgctcggccgccttcatgaacagcgactggttgcccgtgatgccgttcatgttctgttggtacatcatgctggtgctcatgcgcatgctgtgggttccttactctgagcgaccggcgccgttatcggcgccgattaacaatgaaatcaacgaatattcagcagcgcgtcgaacagcgagctggcggtctgaatcacctgcgcgttggccatgtagtactgctggaaacgcagcagctcgccatactcttcgtcaaggttgacgccggacatcgactgctgttgcgcgcccagctgcgtgacgatcttggcctgcgaggtggcgatggccttggcggcagcggtctggttgccgacgccgctgacgatgccggcgtaagcgccgctcagggtcgccttgccgtccaccaggtttttggtttgcagatccagcagcttcttggcgttttcgttatcgccgcggccgctgtcgtctttaccggcggcggcgatcttggacgaatcggtgatggccactttcagattgcccgccacgtcgctgaccggcttcacggtgaagctgtctttggcctgcgcattgccgtcgatgctcacttccaacccgtcgaagttcagcgtcggcttgccgtcggcgctggtgcccggcgtcgcgttgactttcacgttgtccggcaggcggctcacctgccagctgctgccgtcgaactcgacgcgataatcgttggccttcaccttgccggtatcggtgtaagagaccgacagcgacgcgtcgccggtgttgcgggtgttatccaccacccggccgccgctgaagctgaagaagtcgccgcccgcgtcgccgttcagatcgaagccggcgcgatgctgctggttaaagctgtccgccatcgccagcgccaactggcccagctgattgcgcacgccgtccagcgtttcgctgcggaatttcagcacgccgctcagcgtgccgctggtgatctggccttccggcacttcgctggcgccgttgccgcggttatagccgatggtcagacgggaaggatcgctgctggaaggcacggcttccacctgataggtgttgctgccctgcaccagggtcaagccgttggcgaaggagacggtataggcgtcgccgtcctgttgcgtgacctgtacgcccaccagctgattcaattcggtgaccagctgatcgcgctgatccagcaacgcattcggctcgccggcggcgctgccgcgcaaacgggtgatctcgtcgttcagtttggcgatctgttggccgtagctgttgatctgctgcgccgtatcgctgatctgttgattaacgccgttatccatgtcgcgcaggaatttatcggtgttgttgaactggttcaccaggccgttggccttgcccagcaccgtctggcgcgcggcgtcgtcaccggcgttgctcaccaggttctgcaggttggtgaagaagtcctgcatgttggtcgacagcgggttggtcttgctcgccaacaggttgtcgatctgtgaaatcttctcgtaataggcattttgcgccccgaacgcgctttgtgcgccgcgcagctggttggtgatgaactggttgtactctcggttgacgctggtgacggtcacgccgttgccgataaagccgctcatggtggccatgccgccgttctgcgccaggatcgcagtctggcggttgtagcccgccacgttgtagttggagatgttgttgctgacggtactgagcgccacctgagccgcattcagcccgctcatcgcggtattgattaagctattggacatcggaattccttatgctgcggcgccggcggcccacagggttcttaattgagctgctgagcctgttcgctcagcctgtttcggttatcggcaaaaatgagaagaacttgaggaaaaaaagcggcaatgcggtcagcatccagcgaacctccattgccgcctatcccctaaataattggcgccgctgcggcgtcaagaatgacgggggtttagaacaaatctttcagatcgtgggtgtaagctttcaccgcctgctcccccgcgctcttcatctgctgaatcacgctgaccagcttgctggcgtactgcgggtcggtggcatagccggcgcgctgcagcgcatgcgccgcctgttccgggctgtgcgcggcggccacgtcggcgtagcgcgggttgttggtcagcagtttgacgtaatcggcgatcgcctcgacgtacgacccgtaaacgcggaacttcgccttcaccttcttcgccgcgccctgttcgaactcggtggtggtgatctccgttaccggcccgttccagctgccgccggccttgatgccgaacaggttgtagctcggcgtgccgtctgaggtcgggatctcgcgctgcccccagccggactccagcgccgcctgcgcgacgatcagctgatgcggaatgccgctctgctggctggcgaccttcgccggtatcgacaggcgggcgacgaagttgccgttgttgagcgacagcggcgcggcggccggcggcgctttcggcatcgcccggcgcaccatctgctccagcgcctggttcggcagcgtttgcagcacctcgttgtccagcgccatcggcgacaggcccgcggtttcactcggcaccgcgttggcgttgctcatctgcttgaccatcatgtcggccagccccagtcctttttgcgacatctgctgggcgatttgctgatcgtacatcgaggtatagagccgcgtttgatcgctgctcaataccccgtcctgcggcaaggcggatcgcatgcttttcagcatcatctgtacgaacatgccttccacctgctgggccacctgcttgaggttgccctgcgggtcggccgccgcgtcgcgctttaggccgttcagcgcctgggcgtcataggccgcgcccgacatcgccatcagatcgccggccatcagatgatttccagcttggcgcgcaggcagccggcgctctgcatcgcctgcaggatcgacatcagatcgatcggcgtggcgcccagcgcattcagcgcgcggatcacattgttcaggttggcgctggcattcaccttctgcagcgacccaccctgctgttgcaccgagatctgggtgttaggcgtcaccaccgtctggccgccgccgaacggggtcgttggctggctgacggtgttctgccgatcgaccaccaccgacaggttgccctgggccacggcgcaagaatcgaggatcacatcgcggttcatcaccaccgaaccggtgcgcgagttgatgatcaccttggcgtccatcgcgccgacgttgacggtgatgttttgaatctccgccaggaagcgcacctgagagctgttgccctgtggcaccagcacctgaatggtgcgggcgtcgagcggcgtcgcggtgccgccgccgcgttggcggttgatggcgtcgctgatctgctgcgccaacgtgaaatcctcgtcgttcagctgcaggttgagcaccccgccgctgccgaaggtggtcggcaactcgcgttcgatggtggcgccgttgctgatgcgcccgcccgccaactggttgacctgcacgctgctgccgccggccgccgcgcccgcgccgcccaccagcacgttgccctgcgccagcgcataaacctggttatccacgcctttgagcggcgtcatcagcagggtgccgccacgcaggctcttggcgttgcccatcgaagaaaccaccacgtcgatattctgcccggcgcgcgagaacggcggcagtttggcggtcaccatcaccgccgccacgtttttcagctgcatattggtgcccggcggcacggtgatacccagctgcgacagcatattgctgaggctttgggtggtgaacggcgtctgcatggtctggtcgccggagccgtccaaccccaccaccaggccgtagccgatcagggcgttgtctcgcacgccctgcaccgtcaccagatcgcggatgcgctccgccgccgccggcaagcacaccagcccgacgcacagcgcgataaaccattttttcagcatcagtcaatccttagaacggtgaaacatttaagaagaagcgctgcagccagcccatggtctgcgcctcgttgatatagccattgccgacgtattcgatacgcgcgtccgccacctgcgtcgaggtgaccgagttgttgccgctgatggtgcgcgggttgacgacgccggagaaacgaatgaattcggtgccctggttgatggcgatctgcttttcccccaccacgtgcaggttgccgttggccagtacctggttgaccgtcaccgtaatggtgccgttgaaggtgttgttggcgttggcgccgcccttgccgccgaaggtgctgtcgccggaaatgtccatatcggcgcgcgcattgcccaacaggccgtcgaggtaacgcggcgaggtggcgacgccgaacttgctggcgccgttgcggctggcgttggcggaggagcttttgctggcgctgacgttttcctgcagcacgatggtcagagtgtcgccgacgttgcgcggccggcggtcttcgaacagcggctgatagccgtagttcatcggctgcaccgtctggaagattgagccgttcggcatcggcgcgctggccggcgcgggctgcgccgtggtcgcgccgtccaccagcggtttatgcggaatataagcgcagccgctcagcgtcagcatcaccattcccgccagccagcgttgtccctgccgcggcaggattgccatcgaatatgtggttaccacgggtatcgcctttgtttcacgaaagagaatgacgggcgcggcatgccgggcccgtcaaggacagattacagttgcgtcagcttttgcagcatctgatcggaggtcgataccgctttgctgttgatctcgtaagcgcgctgagtctggatcatgttgaccagctcttccgccacgttaacgttggaggtctccacgtagccctgatacagcagaccggcgccgttcagccccggcgtgctctcgttcggcgcgcccgagctttcggtttcctgatacaggttctcgcccacgctctccagaccgctgtcgttgacgaacgtggtcagcgtcagttggcccacctgctgagcggcggtttgtccctgctgggtaacgctgacgatgccgtcgcggccgacggtgatggacagcgcgttcgccggaatggtgatcgccggctgcacctggaaaccgctggaggtgaccagctggccgttctgatcgatctggaacgacccgtcgcgggtgtaagcctgggtgccgtccggcagcatcacctggaagaaaccctgccccttgatggcgacgtctttgctgttgttagtctgcgacaggttgccctggctgtgcaggcgctcggtcgccaccgggcgcacgccagtgccgatctgcagaccggaaggcagcgtagtctgctcggaggactgcgcgcccggctgacgcatggtctggtacagcagatcttcaaataccgcacgctggcgcttgaagccgttggtgctgacgttcgccaggttgttggcgatcacgtccatgttggtctgctgcgcgtccagaccggttttggcaatccataaggatggaatcatcggttatttccttgctgcttagctcactgagagcagtgagttggcacgctgttcgttttcatccacgctgtggatgaccttcatttgcatttcaaaacggcgggcgttggcgatcatgtcaaccatggtctccatcggcttgacgttgctgccttccagcaccccgggcatcacccgcacctgcggatcgttttgcaactgattgccgcgcagctgttgggtttccggcgtcaggcggaacagcccgtcgtcaccgcgcatcacttcgcgcgcatcggccttcaccagcttcaggcggccaatctgcgcgatggtgttcggcggatcgccggcgttcagcgccgaaatggtgccgtcggccgcgatggtgatctccgccgacggcggcacctcgatcggcccgccgtcgcccatcagcggcatcccctgcaccgtcaactgcccggtggaggaaatctgaatgttgccgttgcgggtgtaagcttcaccgccgcccggcaggctcaccgccaaaaaaccatcctgctgcagcgccacgtccagcgggcgcgccgtgtagttcagcgcgccctggctcatgtcggcgcccggcgtcgaggcagtcaccaaggtgcgtgtcgccaggctcggaccgtcgaccggcaccgcgcgcagcgcggcgagctgggcgcgaaagcccggcgtcgacgcattggccaggttgttggcggtaatggattgctgctccagcgtttggcgcgccgcgcccatcgcggtataaatcgcgtgatccataactcggccctattagcgcaggctaaccagcgtctgcaggatggagtcctgcgtcttgatggtctgggcgttggactggtagttacgctgtgcgacgatcatgttcaccagctcctggctcagatcgacgttggaagactccagcgcgccgctggtcagcttaccgaagccgccgccgcccgacagaccaacgcgtggctggccggacgcgccggtttcctgccaaacgttatcgccctgcgacgccagcccttccgggttggagaagttggccatgacgatctgacccagcacctgggtctgctggttggagtagatgcccaccactgtgccgtcgttgttgatctggaagttggtgtattcaccggcggcatagccgtcctgcgccaccttgctcaccgagtcgctgcctacgttctgctgcatgctgccggcgaagctcagggtgaagttttgcgccggcgcgccgtctttggcggtcatcgggatcaccatgctgaactcgcccggcgcgccgttggtgctggtggttttcaccagattaccgctggtgctgaactccatggtgccggcgttcactggcgccgcgctgccgtcctgggtgtagacctgccacttgttgtcttcggtcttcacaaagtaagcgttgatgttgtgcgcattacccagcgagtcgtaagcggtgatggtgttgacgtagttgtagctgtcctgcttggtcggatcgaaagtcttgttttccggcactttatgggtggacttcaggttggccaccatctcgccggaggtggacgccttggcgttcatcatgccttcgggaatgctcagcggcaccgggttggcgccctgctggatggtcggtggggaaccggccgccgggtaaccggtcagctgcaggccctgcatgttggtcaggttgcggttctcgtccagtttgaactggccgttgcgggtatagaagatgccaccgtctttatcctgcatgcggaaaaagccgttgccgttgatggccacatccagcgcgcggctggtgccggtggtggtgccgcccttgaagttctgggtgatgccggacactttgacgcccagcccgacctgcgaaccggcgaacatgtcggcaaaggagacgctgccggatttgaagcccgcggttgcggagttggcgatgttgttaccgatcacgtccaggttggttgctgccgcgttcaagccgctgactgcctgagaaaaggccatgttattctccgaatagtggtcaggctatcgtccgattgagcctgatgcttagggttataagatctgtcgcacgtcttccagggtggcgttgcccgccaggccgagatccagcttggcgccgttgccgtcgcggatcacgccattcaccagcccgaagtgcaggctgcgcgccaccagctgctcgccgttgcctttggcgttaatcgccactttgtaggcgccgtcgggcgcggtggagccgtcatccagcgagccgtcccaggtgaaggcgtgcacgccggcggtcaggccgccaatttcaatggtgcgcaccacctgcccgctggcgttggtgatggtggcggtcacctgatcggcggcgcgctccagttccacgccgaacggcgtggtgctgaccttgccgtccttgctgccgaccagaatattgttgcccggcaccatcacgccgtgaccgatcagcgcagtggcctgcagcgactggttgctgttgatctggccggagatcgaccccagcgtggtgttaagcttttcgataccctgaacggtgttgatctgcgccagctgcgacgtcagctcgttgttctgcatcggattggtcggatcctggtttttcaactgcgcgaccagcagcgtcaggaagctgttgtgcagatcctggctgttggtggtcttgctgttgttaccgatgacggtgttgtccaacgactcgttggtggttgcggcgatagccatggaaatctccggttactgacccagcgtcagggttttcatcatcatcgacttggtggtgttgagcacctcgacgttggcctggtagctgcgggaagcggagatggtgttgaccatttcccccaccacgtcgacgttcggcatgcgcacataccccttggcgtccgccagcgggttgcccggctgatacaccaggcgctcgggcgccggatcgtccaccacctgggcgacgcgcacgccgccggtcggctgccctggcgccgccgcgacctggaacaccacctgcttggcgcggtaaggttcaccgtccgggccggtcacgctgtcggcgttggccatgttgctggcgctgacgttcatgcgctgggattgcgccgataacgccgagccggagatatcaaaaatattcagtaaagacatgcgccttatccttgttgcagcacggacatcatccctttgatctgcccgttgagcagcgtcaggtcggtctgatatttcaggctgttatcggcaaagttggtgcgttcgcgatccatgtccaccgtattgccgtccatcgacggctggtccggcactcggaacagcagatcaagctgtggcggctgcagggtctgcgccgggatgtggcgcgccgccgtcaggttcagcgccatgccgttgccgctgacgcgcccctgctccagtactttgttcaattggctggcgaaatcgatatcccgcgcctgataacccggtgtgtctgcgttggcgatgttggcggccagaatttcctgccgctgggcgcgcaagttcagcgcctcttggccaaagcgcagagccgcgtccagtttgtcgagcatgctccctccgcgaggttagaatttggagtcgacagcataaacgccccctgcgccaccctatcgcgggaataaacgcaaaatggggcgctatttatctgcttagcctgcgcgcgctgcgggtacacttacgcgtatcccgatgaagcttgagaagatgacgatgaaaggtaaaatgctgctgcttatcggcctgctgtgcagtctgaacgcgcgcgccgacgatctggcgacgcaaatcgaaagcttcatccaaggcaagttcagcggcgaaccggtacaggtaaaagtgcgggtgcgcacgccgccgaaccaatggcccgcttgcgaactgccgcagctgtcgctgtcgcccaacgcgcggatcggcggcaacgtcagcatttcggcgcgctgtggccaggagcggcgttttatccagacgcaggtgcaggtgttcggtcgctatctcgtgtcggcgcgcggcatcagcgccggcagccggttgacggcggcggatctggcgttgaaacagggccggctcgataccctgccgccgcgcgcgctgaccgaagcgggcaaagcgttaggcgccgtcagcctgcgcaacatcagccccggtcagccgctgaccctcgccatgctgcgccgcgcctggattatcaaggctgggcaaccggtgcaggtcaacgcacagggcgaaggattcagcatcagcggtgcgggtaaggcgatgaacaacgccgccgccgaagacagcgtgcgggtacgcatggcctccgggcagatcgtcagcggcgtggtcggggacgacggcgcgatccgcattacgttataaaaaagtaaaggttccgccaaccttgccgataagacaaatcaagcagcattttattggccaccagggccgcaacactttcattgcagcgtcgtcgcccgcgagcggcgacggcgtaaacggagatggaccatgagtatcgatcgcacccagcggttacagccggtttccactgtgcaaccgcgtgaaaccccggccgacaacccgctccagccgcgcaaggccgccgtggccgaaaccgccgtcagcggcacgcaggtcaaactgagcgaggcgcaggcgcgcctgatgcagccgggcacccaggatatcgatatgggtcgggtcgaggccatcaaacaggcgatccgcaacggtgaactgaagatggacgccggcaaaatcgccgatgcgctgctgcaagacgcgcagagcgatgttcaatggatcgccggacgcgactgacagcacgcggcgaatagcggtaaaggataagtcattactatggaaaagctggcacaactgctggataaactgttggaaacgttgcaggcgctcaatggtgtgctggaggaagagcacgacttgctgtgctccggccagttgccgggcgtggccttgcagcgcgtcaccgatgccaaaagccaactgctggcgacggtcgcttatctcgagcaacagcgcctggggcaggaaaaaacctgcgggcaacgcgccccctatgccagccaagcgcccctggccgatcgttggcagcgcgttcaattgctgagccaaacgctgcgcgaaaagaaccagcacaacggtctgctgctcaatcagcagatcgaccataacgctcaggcgctggccatcctcagtaaaaacaacaaatcgctgtatggcccggacggccagtcgcacgccggcagcctgctcggcagaaaaatcggcgtttgacctgactcatttgcccggtgagcctatcaccgggcatgcgttcaccggcttctgcgcatcccgtcgcattttctccctatcactctttgaattcacttaaggctttgcgtcaggctgcgcatggcgtgaatttggctgtttctttctctttggcctcttgtcaccctgtggttatttttaaaccacttgaaatatacccttagagggtatagattcgcagggagagcgaatggccgacatttatctcaccaaaacctttcagggttttgccgcacgcgagcgcattagcgacgccacgatagtgaaagcggcgcgagagatgcaacatcagctgtacgatgccaatcttggcggttgcgtatacaaaaagcgcatcgctcgggctggtgcgggcaaacgtggcggctatcgggtactgatcgtttttcgcgatgaagaccgcctgttttttatgcgcggctttgccaaaagtgagagagaaaacatcagtgcggatgagttacaaggattgaaacatctggctgcgctgtatctggattattcgccattcagactctaccagctggtcaacaacaaggaattacggaggctaagcgatgagtaaaattcttgccgagatccaccaggaagttcagggcctgcatcgcgccggtttcgtcgatgacgtgaccatgcgcaccttcgacatgctgtgtctgcggccggtgaaacagttcgggccggccgagatccgcgcgctgcgcgaacgggaaaacgtcagtcagccggtgtttgcgctgtatctcaacgtcagcaaaaaagcggtgcagaaatgggagcgcggcgaagcgcaaccgaactccgccgcgatgaaactgctgacgctggtggaacgcaacggcctgcaaattctggcctgatgttactgataattgacgatcacctgattgccaatcacccgcagcggcggattcagcccgccttgcgactgcacgtaatagacaaagcgcaattccgcattggccggttcgccctgcagaccgttgctgctgccgctgccgccgcccagcggaatacagcggtttaccgtgcagagctgggcctgcagccccaccggttccggccccagcaaacggtagcgccagctgacgctggtgatgcgcgcatgggcatccggcagcgcgttcggcggccgcaaagcggcggattcatcgcgcatcccgccctgttccagcgtgacccccgccccttcagccacccaggagccggacaccgcgccggcggcgagcggagccagcaaacaaaatacgaacagacagcgtttcatcaggccgctccgatggtcgaggtcatgcgaatctggcgatcgtcgttgatctccagattggacaacaccacgatctgcggcaggctgcgacgcaggaagcgcgccagcaaggcccgcagcgcatggttgaccagcagcaccggcggcgcgctgagcatttcttgccgctgcaacgcctggcgtgcctgatccaacagacgatcggccagccccggctccaggccgccgccgccctgcaacgcctgcagcaacagacgctctaactgggtatccaggccgataacctgaatctcgccgttgcccgggaaccactgctgcgtgatcgccctgcctagcgccactcgcaccacggtggtcaattcataaggatcgctctgcgccggggcgtgttccgccagcgtttcgacgatggtgcgcatatcgcgaatggaaacgcgctcggcgagcagattttgcagcactttgtgcagcgtcgtcagcgacaccacgcccggcacgaagtcttcggtcagcttcggcatctcctgcgacacgcgatccagcagctgttgggtctcctggcggccaaacagctcgctggcgaactggccgatcaggtgattgaggtgtgtcgccaccacggtgctggcctccaccacggtaaagccctggatctgcgcctgctcgcgcaaggcgctgtcgatccatatcgcctcgagcccaaaggccggatcgacggttttgtctcccgccagctcgcctacggcattgccggggttgatcgccagccagcggcccggctgcgcttcaccgctgccgatctcgacgcctttcatcaggatacggtagctggcaggcggcagttccaggttgtcgcgaatgtgcaccaccggcggcagatagcccatgtcctgggcgaatttcttgcggatgccgcggatacggcccagcagttcgccgttctgctgaaaatcgaccatcggaatcagccggtagcccacctccatccccagcggatcttccaactgcacgtcggcccagctggcttcggcggcctgcggattctccggcatcaccggatcttccaccgttttcggcgcctgttgttcacggccgcgcagccaccaggcgaggcccaacagagccgcggtaaacagcaggaacaccaggttcggcatgcccggcaccaggcccagcagccccagcaccccggcgctcagcagcatcacgcgcggattgttgaacagctggcccaccatctgctcgccgacgtcctgatcggtcgcgacgcgggtgacgatgacgccggcggcggtggagatcaccaatgccgggatctgcgccaccaggccgtcaccgatggtcagcagcgtatagctttccgccgccgcccccagctccatgccgtgttgcaccacgccgaccaacaggccgccgactacgttcagcaccatgatcatcaggccggcgatggcgtcgccgcgcacgaatttactggcgccgtccatcgagccgtaaaagtcggcctcctgggtcacttcggcgcggcgtttcttcgcttcgtcttcaccgatcaggccggcgttcagatcggcgtcaatcgccatctgtttgcccggcatgccgtccagcacgaaacgcgcgcccacttcggcgatacgccccgcacctttggtgatgaccataaagttaatcagcaccaggatgatgaacaccacgatgccgatggcgaagttgccccccaccaggaagtggccgaaggcttccaccacgcggccggcggcggcggagccggtgtgcccctccagcaagatgatgcgtgtcgacgcgacgttgagcgacaaacgcagcaatgtggagaacagcaggatggtcgggaaggcggcgaattcgagcgtgcgctgggtgaacatcgccaccagcagcaccatgatcgacagcgcgatgttgaaggtaaacagcaggtcgaggataaacgccggcaacggcaacaccatcatcgacaggatcagcaggatcagcaccgggccggccaacacctgccactgcgtatctttaaaattgcccggcaaacgaagcagggaggccaaattagccatcagagtcactctcttttgcaaaatccagtgcttccggcaccggtaaacgttcaggttttttcgggatcaggccgccctcgcgccgccagcggcgcagctggtacacccaggccagcacctcggcgaccgcggcatacagggtggccggaatatgctggccgatctcgctgtgccgatacagcgcgcgcgccagcggcggcgcctccagcatcgggatgcggtgttccgcaccgagttcgcgaatgcgcaaggcgatttcgccggcccctttggccagcactttcggcgcactcatttttttgtcgttgtactgcaacgcgacggcgtagtgcgtcgggttggtgacgatcacgtccgccttgggcacgtcggccatcatgcggcgccgggcgatcgcccgctgctgctgacgaatgcgtcccttgacgtgcgggtccccttcctggtctttgaactcgtcgcgaatatcctgcttggtcatcttcagcttcttgaagtgactccacagctgataaaacacgtcgaacgccaccatcggcgtcaaccccagcaccaccagaaaaccgcagaacagaatcatctgcagcgcgttgcccagcgcatcgagcggctgctgggtcatcagatgcagcatcgccgcccagttgtgccacagatagaggccagtcacccaaccgaccagcgtcgctttcaggatccctttcagcagctcggccagcacctggctggaaaagatgcgcttcaacccggatagcgggttcagccgcttcaaatcgaacttgatcgacttgccgctgaacaaaatgccccccagcaacatcggcgcggcgagcgccaccagcaccagccccgccatgatcggcagcagcgccagcaccgcctggcgcagcaacatgcccaattggcgcagcatctgtttatcgttgctgaccatgccgtgatcgaagttcagaccttgcgtgagcatcgccgccagctgttgcgccatgttgctgccggacatcaggataatcgccaggcccgagagcagcatcagtaccgaggtcagctcgcgcgagcgcgggatctggccgtcttcacgcgccttttccagcctgtggggcgtgggggcctcgcttttttccagatcgctgtcttcagccacgaaacgccgttcctgtgtcgggagggtaaagaatggcggtcagcatgccaaaaaattggcgatgtcattgggggaacaacggggaaaaaggcgggttatttaggggatgagaccaaaacgacgtggcttgttgtcggggcgcgccgtcgcgcgccccgaaaggcctcagaaaccgaggctgtcgagcagatcgtcgacctgcgcctgattggcgatcacgccgacgccgttctggtcgagctgcgggccgttcagcaggctgtcgttcggccgtttttccttcaccggctgctccggcatgttttccatcagcaccatcagcagctgcttttcgatctcctgtaccacgtccatcatgcgcttgatcacctgaccggtcagatcctggaagtcctgcgccatcatgatctccagcagctgggcgttggtgaaagccgtatggcccggcacctgatccagatactggcgcgtgtcgttgaccagagaacgcgcgtcgtccagttcgatgggattggcgaaccactcgtcccagcgccctttcaacgcgttggcgccggattccagctccgcctggcgcggttgcgccgcctctacgcagttcaacgcccgttccgccgcctgcgccgtcatggttacgacatagtcaagacggtcgcgcgcatccgggatcgcctctgccgcctgggcgatcgcctgatcgagccccagttcgcgcatgctgtcgcgcagcattcgggtcagttggccgatgcgggagatgatctctcccgcggtcgctgcatcgctggcaggcattggaatgtctctcatcgccctctccttacatgcccaatttttcaaaaatcttgttgagcttttcttccagcgtcgccgccgtaaatggttttactacataaccgctggcgccggcctgcgccgccgcgatgatattttctttcttggcttccgcggtcaccatcagtaccggcatcgcggccagcgcgctgtcggcgcggatggtttgcaacagctcaagcccgtccatgttcggcatgttccagtcggacaccacgaagtcgaaaccgccggcgcgcagcttgttcagcgcatccgcgccgtcttcagcttcttcgacgttgttgaagcccagctctttgagcaaatttctgacgatgcggcgcatggtggaaaaatcgtccacaaccagaaatctgaggttcttgtctgccattgttactcctgaaatagttaaccgtttaatgatgcaacaccgcaggccgccgcacggcgaacctgggtcatatcgccgccgggaagaccctgcggactgaaatcaaatgcgcaatgcctggccgccggcgatctgcgccagcatgcgctggctcattctgtccagctcgaccacttcgctgacgccgccgctggcgatcgcctcgcgcggcatgccgaacaccacgcagctcgcctcgttctgcgccagggtataggccccggcgcggtgcatctccagcatccccgccgcaccgtcgttgcccatgccggtgaggatcacccccaccgcattgcggccggcgtattgcgccaccgagcggaacagcacgtcgaccgaggggcgatggcggttgaccgccgggccgtcatgcagcttcacctgatagttggcgccgctgcgcgtcagctccagatggcggtcccccggcgcgatataggcgtggcccggcagcacgcgctcgccgtcctccgcttctttcaccgtgatctggcacagcttgttcagccgctcggcgaacgaacgggtgaaacccggcggcatgtgctgggtgatcagcagcgccgggctggtagccggcagcggctgcagcacctggcggatcgcttcggtgccgccggtggaggcgccgatggcgatcagtttttcactgctcagcagcggcgcatggctgaggatcgccggcgccgggctgctggagcgctgaggcaggcgcgctctggccgcggtgcggatcttctcggcaatcagctcgctgtaggccaacatgccctcgcgaatgccgagttgcggtttggtgacgaaatccaccgcgcccagttccagcgcgcgcagcgtgatttccgagcctttgccggtcagcgaagagaccatcaccaccggcatcggccgcaggcgcatcagcttctcgaggaaatccagcccgtccatgcgcggcatctcgacgtccagcgtcagcacctgaggattaaattttttgatcagatcgcgcgccaccagcggatccggcgcggtcgccaccatttccatgtcggcatggccgttcacgatttccgtcatcagctggcgcatcagtgccgaatcgtctacgcataacactctgattttactcattacctctccttggtcagcccatacacggtctgcccacgcaagtagaaatcccggctgatctggctgaaattctcggagtggccggcgaacatcagcccccccggcttaagcaagggaacgaagcggcgcaggatgcgctcctgcgtcgccttatcgaaatagatcatgacgttgcggcaaaaaatggcgtcgaattgccccggcagcgcccactccggcgccagcagattcagcggctgaaagttcactcgcgccgccaactccggccgcacgcgcaccagcccctgatgcggaccggtgccgcgcagaaaatagcgctgcatttgggtcggcgtcagggtacgcagatcttcctggcggtaaacgcccgcctccgctttttccagcacctgcgtatcgatgtcgctggcccagacctggcaactgccggcccgctgccccagggcatcgctcagcgtgatggcgatcgaatacggctcttcgccggtcgaggccgcggtgctccagacgctgtagccgttcggccgcgagcgcgcatgctccgccaggatcgggaagtgatgcgcctcgcggaaaaatgccgtcaggttggtggtcagcgcgttgatgaacgcctgccactccgcgctgttcggatcgctttccagcagcgccagataatcgccgaaatcgtgcaatcccagcagccgcaaccggcgcaccaggcggttgtaaaccatctcgcgcttatgctccgccagcacgatgccggcgcgttgataaatcaactggctgatacggcgaaaatgcacgtccgacagcggcaggcgctgcaccatttgcgtcaacatcgacgcagtatcccggttagaagttgacggcgcctgtttcatgccgcctcaccagagtaaaacgtgctgcttatgcggtttgacaatcttgggcttcctttaccacgggtgaaactgcgttgttgctgttacctggcgcgacgaagttatcgtccgccagacggaataccgcgaccgcgtcggccagggtaatagcctgctcttccagcgcggtggcggcagaagcggattcttccaccagcgcggcgttctgctgggtaacctgatccatctgggtcaccgcctgcgtcacctgctcgatgccgcggctctgttcatccgaagccgacgcgatctcgcccatgatgtcggtgacgcgcgtcaccgaacgcacgatgtcctgcatggtggcgccggaattttccaccagcaccgagccgtgtttgacgcggctgaccgattcgtcgatcagcaccttgatctctttcgccgcctgcgcgctgcggctcgccaggttgcgcacttcgccggcgaccacggcgaaaccgcgcccctgttcaccggcgcgcgccgcttccaccgccgcattaagcgccagaatgttggtctggaaggcgatgccgtcgatcacgctggtgatggcgccgattttctgcgagctgttggcgatatcgtgcatggtggtgaccacgtccccggccagttcgccgcccttggccgcggtggccgaagcgtcgcgcgccagctgagaggcctgccgcgcattgtcggcgttctgtttcaccgtcgcggtcagctgttccatgctggcggcggtttcttccagcgaagcggcctgttgctcggtgcgggaagagagatcgttattgccttcggcgatctcctgcaggccgatcagaatcgactccgcaccgtcgcgaaccgcgccgacggtaccgatcaatgactgctgcgtgcgttgcaggctggcgaacaacatgctgatttcattgcggccatacacctgaatcggcgtcgccaaatcgccggcggcgatgcgttcaaagtggctgcggatttggttcagcggctgtaccaacatggtgcgcaaccaccacatggcgctgccggtcaccacgatcagcatcaagaccgcccccgccagcatcaggcccgccagcgtgaaggagaattggttggcgtctcgagcctcgctgatgtcaccgttgaccaactgcaggtactgcacgaagtcagcctcaaacaggtcctgggttttctgcgtcggctgatccataaacgcctgcagctcgcccttttccaggaaaccgatcagttcacgcagtgcgccgcgcagccgctcgtagctggccttggtggtggccgtctgctggttctgctgttcactgctgcgttcaaccgccataaactgattgaaatagagatcggccttctgcagcgaactgcgggcgctgctcatcaattcgttcacctgctcctgcggcagtttcagcgccgcgcgggtgccggcgcggttcagcgtattgcgcgcctgcaacagcgacacccagctcaggctgagcgaatcgcgctgctggctgccgagggtgatgatgtcgaggttgtggttatcggaacgaaacgcggaatacgacaggccgctgctggccaactgcagaacgcagaaggtcatcaacaacaggaacaagctggtagagatacggattcggttaaacactgtgaacctccttgcagccggccggcgaccggcctacgtagggaaaagggcctctgcgagagaggcccgataccggtcagaacgtttcccagttatcctgcagatcgctggcgttcattttcttatgattgattaccggtgttaccgtcgccttgctggtgacaggcgctttaaactcttcctggccttccgacctcaggcggaataccgctaccgactgggtcagcatgctggcctgttcttccagcgccgccgccgccgaggcggattcttccaccaacgaggcgttctgctgggtcacgcggtccatttccgctaccgcctggccaacctgatcgataccgcggctctgctcgtcggaagccgaggcgatttcgcccatgatgtcggtcacgcgggtgacggcgttgacgatgtcacccatggtttccccggcgctttccaccagcacggagcccatatcgacgcggctgaccgagtcttcgatcaggcctttgatctctttcgccgcctgcgcgctgcgctgcgccaggttgcgcacttcaccggccaccaccgcgaagccgcgaccctgttcgccggcgcgcgccgcttccactgcggcgttcaacgccaggatgttggtctggaaggcgataccgtcgatcacgccggtaatatcggcgatcttctgcgagctgccggcgatgtcgtgcatggtctgcaccacgttggccaccaccttgccgcctttctgcgcggtttcggaggcgctcagcgccagctgtgaagcctgacgggcgttttcggcgttctgtttcaccgtcgcggtcaattgctccatgctggcggcggtctcttccagcgaagcggcctgctgctcggtgcgggaggagagatcgttgttgcccgcggcgatttcagacgcgccgctgtagatggcgtccgcaccctggcgcacgccgctgacggtttcgatcagttcgctttgcatgtgtttcaggctggccgccagcacgcccatttcgttgcggctgttgacgacgatctgctgagtcaggtcgccggcggcgatctgtttgatgtggtcgatcatgcggttcagcgggcgcaccaggatgtgatggataccggtccagaccagtacgatcaccgccagcaccaccaccagcaccacgatcagcgtccaaatagccgagttgtaggagctgttgctgccgtcaaccgcgatttggtacagcttgccgttttgctccagataaacgttgtagctctgctcaaagttgtcctggtaactctgcgtaggctgatcgaagaaggcgttgattttgccttcgcccagcagttggatcagctcggagagcgcgccgtacagcacatcgtactgctgcttgaggcgttccgccgactgaggatcctggcgcgggtcctgaggaattttctcgtacgcggcgtagtgtctttccgcttcacccagctcttccttcgccttggccagcagttcatcaatggtggcgccgctgccgatcttgttggtatccatcatgtagcggataccggcgcggttcagggagttgcgcgcctgcagcaggtcaacgcggctttcactcagctgcagctgctgctggcggatcgtttgcaggacggtaaagttttccttatcgcttttcagcgaggagaaaaaaagtccgcccgaaatcaactgcaaggcgccaaacagcaccaacaccagcaacaggctggtgaccaccttcatacgatttaacatgatttcccttgttgaagcccgcgcagacaggctctgatgacgttgaatgtgagagttatcggcgccgtgcggcaaaactttatgcgggaaagtaactatttttagtgggggttccgagcgcggctgaggccatcgcgacagatcagggaaagtgaagattaaagggggcggcgccccgccccttgagtctgaaatcagacgcttttcgccacgctgtcgaccagcgacatctcttcgctgctcagcagcttttcgatatccaccaggatcagcatgcgctcgcccagcgaaccgaggccggtgagatattcggtcgccagggtcaccgcgaactccggcgccggacggatctgatcggcggtgagcgacagcacgtcggagacgccgtcaaccacgatgcccaccacgcgctggccaaagttcaacacgatcaccacggtgttttcatcgtaggaaacactttgctgcgaaaatttcacccgcagatcgatgataggaacaatcacgccgcgcaggttggtgacgcccttgatgaacgccggggtgttggcgatgcgggtcacctgatcgtagccgcgaatttcctgcaccttgaggatgtcgatgccgtactcctcgttgcccagggtaaaaatcagaaactcttgccctaccgtttcgccagccaatttgctgacggctgccaatcctgccatatcattcaccttttaaatcaataaactcattattatgcggcggcgtccgtcagacgcttttcacggttcaaggtttgcaacgccgagacatcgacgatcaaggccacgctgccgtcgcccagaatggtcgcggcggagatgcccggcactttgcggtagttgctttccagattcttcaccaccacctgatgctggccaatcagctgatctaccagcaacgcatagcggcggccggcgctttgcaggataacgacgatgccctgcgtggcgtcggttttggcgccttccacttcgaatacccgatacagctccaccagcggcaggtattcgccgcgcacctgcagcacacgctctccgccggccaacggatgcaaatcctccgcctgcggctgcagcgactccatcaccgcgttcaacggcagaataaagacttcgtcgttcactttgaccgacatgccgtcgaggatcgccagcgtcaacggcagcagaatgcggatggtggcgcctttaccggcctgcgaacggatctcgacgtggccgcccatctcctgaatatttcttttcaccacgtccatgccgacgccgcggccggaaacgtcggtcacctgctcggcggtggagaaacccggcgcgaagatcagcatgccgacctcttcgtcgctcatgctgtcgctgaccgccagcccttgcgaagccgccttggcgagaattttttcgcggttcagcccggcgccgtcgtcgatgacttcaatacaaatgttgccgccctggtgttcggccgacagcaccagattgcccaccgccgacttgccggcggcgatacgggtagccggctcttcgataccgtgatcgaggctgttgcgcaccaggtgcgtcaacggatcgataatgcgttcgatcaggctcttgtccagttcggtcgagctgccctgcagcgtcagctccacctgtttattcagcttgccggccagatcgcgcaccagccgcgggtagcggctgaagacgtactccatcggcatcatgcggatcgacatcaccgattcctgcagatcgcgcgcgttacgctccagctggctcatgctgttcagcagatcgccgtggttcaccggatcgagcgtgccggagcgttgcgccagcatcgattgggtgatcaccagctcgcccaccaggttaatcagctgatccaccttttccaccgccacgcggatgctggtggattcgctcgccttggcgcgcgcttttggcgcttcggccggtttcgcggcaggtggcgcggcgttcgcgaccggcgcaggctccggtaaggcggccacttccggtaagctcgcttctgcgatggccggttcgctctgggtcggcgtcgagaagctgatttgttccggttccagcacgaagcacaacacggcgctgatgtcgtcttcactggcggaggtgagcaacgtcacgtccagactgtgttccgtctgatgcggatctttaacctcgccgaggttgcccagctcttccaacatcaaggggatttcactggctttcagcccgttcaggctgatgcgcatgccgccctcgatcgccgccggcgcggccgatggcttaacgacaggctgctgaacggccggttgagccgcaggcgcctcttgctgctgttgcgcttccaacgccagctggcgcagcgcctgacaaatgtattcaaagctttcagcgtcaggctgttgcgaggttttataggcgtccagttgctcctgcataatgtctttggtttccagaaacaggttgataatctcggtgctcaggctcatttcctggcgtcttgcaccgtccagcaggttctccagcaggtgggtggtttcctgcagcaccgaaaaaccaaaggtcgccgcgccgcccttgatcgaatgcgccgcgcggaagatggcgttcaacggctcgatatcgggggccagcggatccagctccagcaggtgttgctccatgtcggccagcaactcgtctgcctcatcaaagaaggtctgataaaaatcgctaatgtccatgctcacggggtcacctctggctgtgagtcgcggttagtcggtgcgggtgcggacgccggtggttccggcgcctgatcggccggtgctatcgccggggatgcctgcggtggagcgcctggcgttgtcgccaccggttccggggccgtcgccgagggttccggcgtttggctggccggtgcggtcgccgacggcgccagctgcttcaggctgtccggctgggcgatatccatcgcgttgctttcggcattttcgtgctcgatgccctcttgcgtttgcttgttcagcaccagcacggtgatgcgacggttaatcgcgtcatcggcgccatgctgtttcaggctcatggtggccgccatgcccaccacccgcagcaccttgccttccgccaggccgccggcgatcagctcgcgccgggaggcgttggcgcgatcggccgacagttcccagttgctgtagccgcgctcgccggtggcgtaagggatgtcatcggtgtggccggacagacttattttgttcggcaggtcgttaaggatcggcgctatcgcccgcagaatatcgcgcatgtagctctcgacctgcgcgctgccggttttgaacatcggccggttttggctatcgataatctggatgcgcagcccttcgtccatcatgttgatcagcagatgcggacgcagcgccttcaggcgcggatcggactcaatcaactcatccagcttttcgcgcagcttgttcaggcgcagctcttcggcgcgcgagtccggcgaatcgacctgttttttcaccaggccatgctgctgcgtgggatcgtcgccgccgccaggaatggggctgctctcggaactgctcttgtcgccgctggtcagggcaaccttgagcggcgtacggaaatattcggcgatttgcgtcagctcctgcgggctggcgatcgccagcagccacatcaccaggaagaacgccatcatcgccgtcataaagtcggcataagcgatcttccaggagccgccgtgatgggcggcatgatgcgacttgcgctttctgaccagaacgaccggatgattctgtttcatgcttcttcttcttccgtcgcctgctgcgccggcgctttcacgcggcgcacgtgttcttccagctcaacgaaagaaggacgttcggtggtatacagcgttttgcggccaaactcgactgcgatctgcggcgcgtaaccgttcagactcgacaacagcgtgaccttgatgcactgcatcatcttgacgttttcggcgctcttctggcgcagcaacgtcgccagcggcgagatgaagccgtaggccaacaaaatgccgaggaaagtaccgaccatggcgttagcgatcagcgcgcccagctcagcggccggacggtcagccgaagccagggcgtgcaccacccccatcaccgccgcgacgatgccgaacgccggcaaggagtcgcccaccatcgccagactgccggcgggcacttcgctttcctgctcgtaggtttcgatctcttcgtccatcagcgcttcgatctcgaacgcattcatattgccgctcaccatcagccgtaaatagtcggtaatgaactccaccagagtgttatcggcaaggatgcgcggataattagagaaaatttcactttcttgcggattatcgatatcgaactcgagcgacagcatgccctgctggcgcgatttggccagcagacggaacagcaacgccatcaaatccatatacagatctttgttgtatttggaacggcgcatcagccgcggcagcgcgcgcagcgtggctttgatcgctttgccgttgttgccgacgataaaggcgccgacgcccgccccgccgataatcagaaattccgccggctgatacaacgccccgagatgaccgcccacgatcaggtagccgccaaacaccgcacccaataccacgagataacccaaaataactagcacacgcattccttaaattaacaatgtggatggaaggtggggcaaacgcgccctggcgcgacagaccaggctgcatgtctgggggcggcatgccgcccctgcgtatcacacgtcggtattcattgccgagagccggcaacgtggcggctcaaatggcgcgtttgacctgctcgtccagcagttgaggaataatatcggccagttgcggcgaaagtttacgtctttttacggcgcgggatgggggttggcataaactgcagatgaaaccattcagcggctggtgcgcgtgggtgataaatgcgccgccgcagcagctgcaggcggaaagctgcaacatgccgctatcgacgaagcgcaccagcgtccaggcacgggtcagcgccagcaacggcgcctcgccggcctgctgcggacactgctcgagatagaggcgataggctttgatcaccgcctccacgccgctgcactgcccgcttttcatcagaaacaggtaagcgttgtaaaacatcgacgagtgaatattttgttcccaggtcataaaccagtcggttgagaacggtaacattccttttggcggcgggctgccgcgtaactccttgtaaagtttaatcaagcgcccgcggctaagctgggtttcactctccagcatctgcaatcgggctcccagcgaaatcagctccatggcgagctgaatgtccttggcttcttgaacgatacttttctcaaccatcatcaggctcttttcttcgtcgggctagcgtctttactcgatagctcttgcagtaaatggcttgatagcaaaatgccggtatggatttgttgcagatcgtcgacgcgcgactctttggtcaggcgttcgatggtctggctttcgttaaagcggaagtggcaaaccagctggttggtctcggccagtttaaccatttgcggcaaagtcagctgcgccagcgcatcggccatggtttcatcaatacccaggcgaaacattgcggacgctttttcatcgttgatcaaacgctgtgctaaaagtaaatatgacagattgatgtcataaatatgcttaagtaattcagacgtacccatattccccatcccgacagactatgtttaaaaacatacgctgggtgataaattttatcgcccgtgacttgggttgtttcccaaagttggcaaattaatctctcaaaaacgactgctataattttcgacaatcgctaaattcgaccactgttcagtatttgctacgagcgtaaaccaacgtgtatggatgtacagcattctgcttcgatagtgtttagtcaccatgaaactatttttacaaatttaataagattattcctaaagcagcgcaactctacccccgaaccattagcacacacaatgtaagtgagaggcaattttaaatacaatgtgacatagatcacaaaaataaaaaataattaagccaaatacccccaaatacgctcacttattgaccgccattttgctcataaaacagccataggtaaaaaaacgtcttaaaaacaatgtttatccgccaaaaaattatcttttttagatcaattcgaacaaaagcatcaccaaaccaaaataacagaacaaaaatctgcatataggcaacaaactcagtataaataaccatttgagttactaaaaaatatccaagctgaaaaataaccaatgtaaactataaggttattagctatcggatttgacttaagccttcagcctgaggctgttctaattttcaacatcaggtgattatggcttatcaatgattcgcaggcgtagtgaacaagccaacagacgtaacgatatgtttccgtattagcacgatgcaagagtgctttttttgagttaaattcccccaaaacgttatatcggcagcaattcataaaactttaatgctttttatttctttttctgacgccgagataattccccctcccctcagagattatttacatggctttggctttcattgcttcattgtcataaaataaaacgcagttttgttttactgttcatatttcttcatcgaacaaaacggctttgcaacgcaagcagcggcgacaaacatcgcccaatgccgcggcggcgccacggccgggtgaaaaaatcagccaaaagaggcccggcacggcaccttgtgcttgcccacagcacgaacgacgacgcgtcgaccgtcaaccgccctgagactttccctatttctccattaatcagcaggctgagattgctgacggcgcactggcatattatgatttaccaaagcgccgctacgggcggcgcgacatcattacccagtgcaatttatttaattgaaatgatttttgtcaggtcgtacatcgctgcctcgacggcgtcgccgtgagtcgctatgtgttattcacccggctttaactattaacaggctatattttaatcatgaccgatacgctcgaatatctgctgacatttcgtaaatgctcctctttggacagcctggagaaggtgtacgacaaactgaactactccattgaaaacgatacggaaatgagcaatatgtaccgtgccgccgaccaccgtcgcgccgagctggttgccggtaaattgttcgatctgggcaaggtgccgaaaacgctgtgggcacaggtgctttaattcagtgaaattacgtgcggcaacggttttatcttttattgctatataaccggggcacattcagcttttattgccgcgcgtgatatgaaacacatttattccccccgccaggttctaccctttatccgacgcagtacttccaccaaggccgccgctgcagcagcctgaaacacgatggatacaacaaggagtcggatatggggtatcaaaacgttctggttaccgtcgccgttgcccctgacagccatcgcctggtggaaaaggccgtctccatcgttcgcccctacggcggcagcatcaccctgttaagcaccctcgccaatccggaaatgtacaataatttcgccgggccgatgctgggcgatttgcgctcgctgatggaagaggaaacccggctgtttatgcaggaactgcgccaacgcgccggctaccctatcgccgatacgctgatcgtgcatggcgagctgggtgacagcctggcattcgccagccgccgtcagccgtttgacctgctgctctgcggcaatcaccgagacagcatgatgaacaaagtctcctgttccgccgcccgctttatcaatatcagtcatatcgacgtgttgattgttccgctctgagctaagcacattcggtcacgtcgcctcagcgctcctgcactaggcttaacggaccttgtttgccgcaccacaaaggagctttcgatgtccccttctcaacagaaccgccgcttcctgctggcctcgcgtccgaacggcgaaccgacagcggcgaacttccgtctcgataccgtccccgcaccgcaacccggcgccggccaactgctgttgcgcaccgtatatctgtcgttggatccttatatgcgtggacgcatgagcgatgccccctcctatgcgccgccagtggagatcggtcaggtgatggtgggcggtacggtatcgcgcgtggcggcctcacagcatcccgatttcaacgtcggcgattgggtattggggtatgacggctggcaggaatatgcgctgtccgacggcagcggcctgcgcaacctcggcccgcatttgccgcacccttcccgcctgctgggcgtgctcggcatgccgggatttaccgcatacatggggctgctcgatatcggccaaccgcaggcaggtgaaacgctggtggtggccgccgccagcggtgcggttggttcggtggtcggccaaatcggcaaactgaaaggctgccgcgtcgtcggcgtcgccggcggtgcggaaaaatgccgctatgtagtggaagagttgggtttcgacgcctgtatcgatcaccgcgccccagactttgccgaacggttggccgccgcctgcccacagggtatcgacatctattacgagaatgtcggcggggcggtgttcgacgccgtactgccgctgttgaacaccaaagcgcgtattccggtatgcggcatcatcgcccattacaatgccaccgggttacctgcggggccggaccgcttgccgctgctggaggggctgatcctgcgcaaacgcatccgtatgcagggctttatcatcttcgacgactacggctcacgctttgacgagttcttgcaacaaatgagcagttgggtcgaacaggggaaaatcaagttccgcgaagacatcgtcgacgggctggagcaggcgccgcaggcgtttatcggcctgctgcaaggcaaaaacttcggcaaactggtgatccgcgtcgccgacgaataacccgtagcagggcgtggtacgccacgctctgcttttaatgtacggcgccgtcgccgaatcgcacatcttcctctaccgtcagcgtcacctgaacgacagtgcgcaccgcttccaccatcgtcgccagtgccatgctcggcttgcccgggtgcgctgccgccagttcatggctgtacggaatatgcacgaacccgcctctggcccgcgaatgctgcatctccagatagtgacgcagaccataaaaaatgtggttgcagttgtaggtgcccgccgtataagagaccgccgcggggatcccctgccggcgcagttgctgcaccgcggccttgacgggcagcgtactgaaatagcccaccggcccgccggcaaccaccggcacgtcaatcggctgtttaccggcattgtcgggaatgcgggcatcgatcagattgatggctacccgttccagggatatttcggcccggccgccggccagccccagacagatcaccgccagcggctgcaatgcctcaatcgccgcgatcaactgctggttggccacgcccaatacgcacggcaactcgagcaccgcgatctccgcgccggcgatacgctctccggccaatgcctgcgcgacctgccaggaagggttcaccgcgtcaccctcgaacggctcaatgccggtgattaacactttgttcatcatttcccctgattgaaggctacattcgtgtgctaccagcctagggaacgctgtaagattctggaaatggattatctgtatatagagtattcataaaatgaatttagccaacgtcgatctcaatttactggtggtgtttgaagcgctgtatcagacgcgcaacgtcaccgccgcaggccggcgtcttaaccgcgcgcaaccttccgtcagcaatgcattggcgcgactgcgcattcttctgaacgatccgctgtttgttcgcagcggcggcggcatggcgcccacgccgcgcgcccaccaacttatgccacagatacagcgggtgcttgagcaaatccatttggcgttggccccgccggcccgtttcgatccggccaccgccgggcagcggcgttttacgctggccgccggcgactatgcggatatcttgctgctgcccgccatcatcagccgtttgcgtcaggcggcacccggcatcgatattcgcgtttcgcgcctggatcgccacaatatttaccggcaactggatcgcggcgaggtggatatcgcgctgggagggcacctttccggtgcggaaagccactatgtgcgcacgttgtttgaagaacatctggtgtgtatcgccagccgttcacacccacagctggcggatggccgctgggatctggcgcgctacctcagcctgccgcatgggctgtacgcaccggcagacgacggctctgccagagggttggtcgaccggcgtctggcggaaattggcggtcaacggcgcgttgccgtgaccttttcgcacatcgtcgccctgccggcggtggtcgccgacagcgatctgatcgccaccctggccgccagcgtggcccggcgtttttccgatccgcaacgcgtacgcattctcccgctgcctaaggagttggccatcgcgcctttccccattgagctgatcgccggccgacaggcgcaacgcgacccggccttaatctggctctgtgacctgataagccgactttccctcgatccccttccgcgctaaccgcatcaattgctgctttatcaaccattcagactcaccgtcggaggcccgcaccgcgggcttttcacgccggccaaataggaatcatccgaattaacattcggtaaatttatatatttgatcatctttaactaacgaatggtaaggataaaaaatactcagtgacttttttcacggaaaaaaagagttgttttataaacacgttgacttaagtgttacagatttattatttggtattaccatttgaccaataatttgggataaaaaaagatctgcgcgtatctatatgttttagataataaaaaaccagatcgtgagcgagttaacgaattgagcattgatccacaaggctattttgcaaatgcagagctctattgtagactgcacaaatcgtgcctttgtgtaaactttgttaaatctttcgtcagcccctgtctcaattcgtgacagatacgccatcgggatcgcgcgtcaaatctcgtgcggtagctatgcctaaatcggggatatagtatggatcgccttatcattgcgcacacgcctttgcccgccaatcagctgttgttcagaagcctttccggtgaggaaaaactggccggcctgttcgaattcgacgtcgagctgctcagccccgacaatcggctcgatctgaaagcgctgctgggacaaaaaatcacgctggaactgcggggcaatccgttggcgccgcgttatctcaacggcaatatcacgcgcatgaccctctccggacgagaagccggcggcaaccgttactatatctaccgcgccgtgctgcgccccacgctgtggtatctgacgcaaaaccgcgattttcgcatctaccaggaacagaccgttcccgacatcctgactcaggtgctggggcagtatcaggtgaagatcgataaccgcctgagttacgactaccgcatctgggggtactgcgtgcagtaccaggagagcgatttcgatttcatcagccgcctgatggaacacgaaggcatctattattatttcacgcaccagcaagacggccatacgctggtgctggctgacgcgccggcggcccatcaggaactcgccggctacgccagcattccctatcagctcgcggaaggcggcctggtggaaaacaaagacagcatcaacagctggagcgtttctgacgccatcacgcccagcctgtatagcctggatgactacgattttcgcaagccgcgcgcgcggttgctggaggcccggcaaaatcccgcctcattcgcgcaggacaaagcagaggtgttcgactggcccggccgttataccgatcacgcccatggccagttttacgtcaaggttcgccaacaggagttcgaagcgcagcatgagcagatgagcggcgaaggcaattcgcagggcattgcgcccggctatcgttttcaactgacccaggcgccgcgtatggaagacaaccgcacctacctggtggtcagcgcacattacttcatgcaggagaacagctacaccagcaacgataacgatgtcggcgaacagcgaaccgaatttcaggtcgttccggcggatatcaattggcgcccggcgcgcaccacgccctggccgaaaacccatggcccgcaaactgccgaagtggtgggcccggaaggcgaaagcatctggaccgataaatatggccgggtgaaactcaaattccgttgggatcgccacggcagcggcaacgaaaccagctcctgctgggtgcgcgtctccagcgcctgggccggctggaaatacggcgggatccagatcccgcgcgtcggtgaggaagtggtggtcgactttatcaacggcgatccggatcgccccatcatcaccggccgcgtttacaacgaagacagcatgccaccgtgggatctgcccggcgacgccaccaaaatgggctttatgagccgcagcaaaggcggcggcgtcgacaacgccagcttcctgttcctggaagactcgcccggcaacgaatctttcgacatgcacgccgaacgcaacatgaacatgacggtggagaacgacaagaacgtcaatattgacggcagtcgcaccaccaccatcggtcgccagcaggacgacaccgtcaccggcgacgccacgttcctgtacaaagcgaaacgcaccacaacggtcaatgggctggaaaccgccaacctgaacgctcaccagacggtgaacatcaaaggcggccgcgacctgacgattatcgacggtggcgataaaatcgacatcaccggcaatcagtccttcaagctcgacggcgcgcagacgcaaaacattacgcaaacccagcatgtcacggtgaaaggcaaccagaccctcgacattaccgaggggcaacaaaccagcaccatcaagcaagggcagacggtcaacatcacctccggcgggcagcacaccaccatcaccgccggcgggcaggaattgacgattaaaggcggcggccaaaccgccaccgtaaccggggatgtcaccgagacctacaaaaacgatcagagcaccacgatcaccggcacgctgaccatcaaggcgaaaacgatcaatatcaccagcgcggacggcgtatcggtgcagacaccgagctggaaagataactgccacggcttgaaatgggtggcgaccggggccaacttcgccttttacggttcaaatcttgcgttgacaggagccagcctgaaacacacgatgctggatatctcgcacaacccgctgtcgatcagcaaaaccaatttcaagctcagtaatgatcccatgacgttcacgcagcttggcgcgctggtgaccaacggtgccttacgattgagcaccaaggcgctggcgatcttcttgtaaagggactcccatgtcgaaggccaaaaatgttttcaccgtgatcggtttgattttattggctcccattctcagcctggtgggctttttcaaattcatcacggtcgatatctggggttatttcaaacatatcggttcttccctcagcgtgatggagaacggtatttccgcctcagggcaaatcgtcagcattcgccagaccaacctgtgggacgggaatcggccggtctgcgaagtcgaagtcaagtacatcgcccaagacgggaaaaaccatacggccgtggcgaaaggcccgatcagcgtcgtggatctgccgcgttatcagccgggccatttcatcgcgataaagtacgatccgaagaatcccaaaaaagcggtgatcgaagagctttcccggctttgagcgaaaagcatcccttcaatcacgcgatccgatttcaacgttccgtaaacggcttaccgttcatcagttcgcgaaatcaccttgcataaggaagtgtcacgatgggcacgttcattgccttttcgacgcaggacagcctctggggacaagtcctgtttaccttctttggcatcctggttggctgcgtattgctcgctgcgatcggcaaaacctttttgtcggccaaccgagcggccacgttgcctgtgcggctgctgatctttgtcgcgctgatgctggcgctcctgaaatacaaccagcaggtgatgtctgcggtaaatgcccccgcagaactgatcggattgctgatttttcccggctttttgatgagttacctgggtgcggcgcccaccggcagactggcgctggcgatagagctgccctgttttgcggcgctcgccgcgctgctgatcctgggcaccaatgacatcggcttctttgcgccctatcacctggagagcgccggccaattgatcgccaaggcgatcgccgcggcgttgtccgtggccgccgtgctgctggctcgtggaataagcggaaaggacaacgcactgtcctcttgatcatccatttcgaagcggggcgctccccgcattggcgatcggctctgaacgccgcatcattttcttcatctgttgtgacatagcctgatatctattaaaccgaaaaacggattgtttttgagcaagcagcctggctgccggctgatatccacaggaagctttacacacacaatgaaagtcgtaaaacctctgcgcctcagcgcgcttcatcgtcccttctcttggcaagggcaaaaccatctgggcgtttccgttttggccttggccgacatgggggcagccccgcgcctgcgtcccgaaccggagttgtggcagttggccgccgacgaactcacgttgagcggcggcgtgctcgatttggctatcccaaaagcctgcgcggagtttctcgccaccggcaatgcctacacccatcatcaacaagacaaaaccgcttgcgccgtgaagatccagcttgattcgctggaaaaaacgctggtggttttcggcgatcgccattggatcaacgatcgtccctctactcccctccctttttcagaaatgcgtctggactggcgccgggcttacggcggcgcacagttcgccgataatccgcacggcatcggcgccaccccagaaacatttccgcaaggccgcatccatcgtctacccaatgttgaacccctgcaggggcgccttgcgtcttctcggcaaagcgcgcaaccggcaagctttgacgcgttggatatcacctggccgcgccgcttctcccgcatcggcaaaaactacgacgccgactggttgaaaaacggctttcccggcttcgccaacgatatcgactggcgcctgttcaacatggcggaaagcgatcagcagtttcctcaacgcgacagcttgccgccccgggccgcctatcggatttggaacatgcacccttcagaaccggtgcagcaagggcatttgccgccgtggcgcgcgcgctgcttcatcaaccggctgcgcggcggcgaaacgcatttcgaagagatcgcgatgcgccacaccaccgtctggttcttcccccatcgggaacagatgctgctgatttatcagggcagcgcacgcatcaatgaagacgatgccgccgacgtgatgcagctgatgccggccctggaaaccgaaggcgaaccccgctccaccgcgcattatcggcaggtattggcccagcggctggataaagaacggggtgctctgcacgcttttcgtgagcaagagttgttgccggaggcgtgcatcggcgcctggctggatacggaaacgccgacgcagcaaagcccgatggcggaaaatatcgccgcctacgagcaccagcaacgcgaagagcatcgccagcgtctgctgcgcgaggagcaagacattgatgaacttttcccgcacccgtcgcaagaggcgccgccgaagctggaccagctcgccgaattcgtcgagcgtctggaaagccaggccgaggcgcagtatcaggacatgctcaagctgacgcaagccgagggtatcgatccgctcaatcccggtggggatcacgtgccgccatccggtgcggaaagctaccagcagcaacgcgatctgctgttccaggaggcacgccggcatcctgacgcatttagcgataaacagcgtggggaaagcgaacgcgcgctgcaccaaatgtatttaatgtcggcacaggcgcaaagccctgcactgcgcctgcgtggcgatctggcgcaaatcattcgccaacgcgtcgccgccgccatgctgcgcgataaggatctcagcggcctggatctcaccggcgccgatctgtccggcatggatctctgccaggctaacttgcgcggcgctttgctggaaaacgccaatctgcgccaaacccaattggtgggttgcgatcttcgcgaggcgatgttggcgcgcgccgatctcagcggcgccgtcttacagcaggccgatttgagccacgcctccttagccctggcgaaatgtgaagcgacggatttcggcggcgcgcagttgcacgaaaccaacatccagcaaacgttgtttcaacgctgcgatttcactatggcgtcgttacgcgacttgctggggtacgaaaccctgctcgggcagtgtgacttcaaccgcgccacgctggccaacattacgctgatggagctgcaactggagcaactgacattcagccacgcccggctcgacaaagtcagcttcgtcaaatgccggctgctggcggtgaacttcgatcgggcgcggctagagagctgcgcctgggttgataccgagacgcaaagcctcagcttccgcgccgcacgcctcaccgcctgcgccttcgcggcaaagacgctgttgccgcaggcggatttcagcgacgcgacgctgaaccagtgcaatttgcgccagatgccgttgcagcgggctaatttcagccgtgcgcgcctcgacaactgcgacctgtcggaagcccggctgaacgaggccgatttccgtcaggccaacggcagcggcagcctgttcattcgctgcgatctgtccaaggccaacctgcgcgacgccaatttcatcgcggcgatcctgcaaaaatgcgtgctgtcaggcgccgacctgcagggcaccaatctgttccgggccgatttgtcgcagtcgcaagtggatcaggcgacccggctcgacggtgcctataccgccagggtgaaaaccttgcctcgccacaacgggaaggaagtatgacgtcaaaacctgagcagatacgccagcgcgtgaaacgcggcgagctgattgccggtgaggatttgcacggcctgtcattcgccggtatggatttggccggcggcatgttcaacgaactgaacctgaacggcgtgaacttctccgattgcgatctgcgcgacagcgtcttcagcgattgtcggctcgaacacgctcaatttgcgcgggcgaacctgaagcaaacggccttcaatcagtgcgccatggcgggcggccgcttcagcgagagccatatcgaactgacgatgttcaacgactgccggcttgaacagagcgactttagccggctgtcgctcaaccaaagccactggatgtcatgccaattggccggcgcgaatttttccgccactcagcacgatcgcaccaccttttacgaaagcccgctcgacggcgcagatttaagccatacgaggctgtcacttgtcacgttctttcgattaaatctctgtgaaacaaggtttgaaggggttgatttcgaccgcgtcacgtttttcgaatgtgatcaccgcggcaaaagttacgccgggcagcgtctcatcgcctgccagtttaccgataaccaactggacgacgtcgatttcagccaggcgacgttgcgtcaaagcaacttcaagggcgcttcgctgctgcgcgccaacctgacgggcgtgcaagcgcagcagtcactgtggctggaggccaatctgacccacgcgcagtgccgcaacgggcagttcgatcaggcgatcttcagcgaagcgacgctggacgccgccaactttagccaggcgcgcctgtatcaatgcgtgttccagcgcagccgcgcggcgcgctgtgatttcagcgacagcgacctgacctacgccgacttctgttacgccgacatcggcgccgccgatttccggcgcgcgcgttttatgcgcacccgcatgcaccgcgcccaccagcagcaaacgcgctggggcgatcgcagcgggatcctcgagcgcgacgaagaactgtacgccgccgaaacctggagcgcacagcgccagagccgaatctgaatgcattgaccacttcacgaggggatcaccatgagcgttgccaacacaactcgcgccgtcaacatcgcaccgccccagcaggccgccggccaggtcgtcaacctgttgccggacggcagcctggtggtggagtgcgaaggccgcggctggcattgccgccgggcggcgagctgcctgctgacgccggccctcggcgataacgtgctggtcgccggttgcggccaccagctgtgggcgatcgccgtccttgagcgcgcagagccgcaaagcgcggcgcggctctgcgtcgcaggcgatctgcacattgaaacgccgaacggctcgctgtcgctgcacggcgcgcaggcgctgaacctgagcggcgacgccatgacgctgcaagcgaacagcggtgactgccacgtcgacaagatgaaatacagcggcgaagagctgtcggccttcgtcagcctcagccgcctggtcggcaaacgctgcgagtcgctgtggcattcggtcagccagatcagccattcgctgttccgcaaagtgcgccagaccgagcacgtgcgcgccgggcagctggattaccaggcggaagattacgcccgcattcatgcgcgcaacacgctgattacctcgaaagacatcaccaagctggattcggaacaaatccacgtcggataacctgcggaggcctttatgtttgccaacagccaaatgatcggcgtggacctggcgtttcccgacgtctgtctgacgccaagcccggcgccggtgcccgtgccttacccggatatcgccctggcgccgaccgccatcccgaatgcgttcaacattctgttcgtcggcaccccggcgcacaacatggcgacggtgacgcccctgaccaacggcgacaaccccggcgtggccaccggcgtcgcttccggcacggtgatggggccgtcccgccacctgaccggcgcctttaccgtgctgctcaaaggcaccccggccacccggttgaccagcctcagcctgcagaattccaccaacgcgctcggcatgcgcatcgtgccgagccaattaaaagtgttgctgcttgcgccctgatgacggcgccttattacacagccattcaatcaagaaaaagaggacattgtgaaaacacggattaccctgacgctgctgaccgccctgatgcttgccggttgctccaccccgccgccaccgccgccggcgctcaataacgacgccatcgtcagcagtgaagtcaatggcgtcacgctaaagcaccgcgccgcggtgagcgcgccgaaacagttcaagccgatcggtgaggaataccgcagcctgtacgccgccagcatcatgagcagccccgattataccggcaccgccgtcggcagcctggacaacgccgccgcgttctacgcgctgggcgaagtggaaaacaactggctggcgatctccgccattcgcggcggcgacctggtgggttatatccaggccaacgccggcgtgccggaagcgcgctacaaatcaacgctgcgcaaagatctgccgcgccgcgcgcgcgccgccaaacaggactgcgtcaaagtcggcggcgacagcaaggcgtgtaaaaacgccggctcagccacctggatcctccagtagtcagtacgcctgcgggcgacgagattcccatgatgacgacccctatcgcttcccgctggtgcgggatgctgtttctgctgctgggcgcgttggcgctcggcggttgcatgtcttccgccaaaagcgtgccgtcgcgctacagcctggtgttcgatgccgatcgccaggtcaacgccgccgccggcgcgcaaccggcgccgataaaaattcgcgtgctgctgctgcgttcggatgcggaattcatggatgccgacttcttcagtctgcaaaacgacgccaaaagcgtgctcggcaatagcctgctggacagcgatcagttcttcctgacgccgggccagaccggcaagacgctcggcgggcaaagcgcattggacgcacgttacatcggcgtgatcgccgagtatcaaaacctggacggcaaggcctggcgcatttcgctgccgctgccggagcccaccgaaaccaatttctacaaggtatggcaattctcgccggatgagctggaagcgcatatcgtcgcgggcgtgaatggcctgcgccccgtaaaaaaggtcgactgatctaccgctgcgctgaagcgaagtaactataggtgtgatgatgaaagatgctcataaggttgtctggactgaggggatgtttttacgccctcaccatttccagcaggcggaaaactatctcgaaggctatatgcgcaactggggccaggcccacagcggctgtttctgggggttcctgaccctggatctggaccaaacgctgctgcgccagggcaagattgcgctcaacgccgccagcggcatcatgccggacggcacgccgtttcgctttgccggtgcccagcaggcgcccgcgccgctgagcatcgccgaaaacaagaccggtgaaaacgtggtgctggccctgccgacttaccgcgcagggcgtgaagacgtgatctttcaggaaagcccggaagcgctggcgcgctatctggcctacgagaacgaagtcgacgatctcaacgccgtctcggtgggcagcgcggcgctgcagttcggccgcctgcgcctgcggctgatgctggagagcgagctgaacgccgaatggacggcgctcggcgtcacccgcgtgctggaaaagcgcggcgacaacagcctgcgtctcgatacggcgcaaatcccgccgatgctgaactgtcagggcaacccggtactgaagaccttcatcaacgatctgcagggcctgctgcaacagcgcagccagcagatgagtcaacgcctgctgcagccgggccgcggcggcagttccgaaatggtcgatttcatgctgctgcagctgatcaaccgccatctcggtcaggtgagccatgcctaccacctcgaccatctgcacccggagcgcctgttcgccgattggctgcagttcgccaccgaactcgccagcttctcggcgcagcgcaccccggaaggccgcctgccggtgtacgaccacgacaacctggcgctgtgcttcggtaagctgatgctgttgctgcgtcaaggattgtcagtggtgctggaagacaacgccattcagctgacgctggtcgaacgatcccacgggttgaacgtcgccaccgtgcaggacaccaaaatgatgcgcgacttcggtttcgtcttggcagtgcgcgccgacgtggccgccgaggtgttgctgacccacttcccggcgcaaatgaagatcgccccggtcacgcgcatccgcgatctggtgcagctgcagctgccgggcatcggtctgcgcaccatgcccgtcgcgccgcgccagatcccttatcacgccggctatacctatttcgagctggaaaaaggcggcgacctgtggaaacagatggaaaaatccagcgccttcgccctgcacctggccggcgaattcccggggctggacatggaattttgggcgattcgcagccatacggaccggtaacctatgactcaggaaaatagcatggcgccgggggccaatccgctggtggacgccgccaacccgctgctgaacgccatttcgcagatccgccagtcggccacgcacgccaacccggcgcagctgcgccaacagctgatcgacgaaatgcgccgcttcgagatccgcggccaacgcgccaatctgccgtacgaagtgatcatcggcgcgcgttattgcctgtgcaccgcgctggatgaagcggcggcgctgaccccgtggggcagcaacagcgtgtggtccggcagcgggctgctggtgaccttccataacgaaacctggggcggcgaaaagtttttccagctgctggccaagctgtcgcagagtccgcgtgagcacatcaacctgctggaactgatcaattattgcctgctgctgggctttgaaggccgctatcgggtgatggaaaacggccgttctcagctggaaaccatgaaacagcgcttgctgcagctgatccggacggtgcgcggcggctacgcccctcccctgtcgcctcatgcgttggatctgccggtacagcaaaaactgtggcgcccgctggtgccgctgtgggcctgcgtggcgctgaccggcttcctggcttcgctgctgttcatcgccctcaactggcggctgggcgacaacaccagcccggtgctggcggcgatttaccaaaccaatctgccgcaggtggcgatcggtaacccggcgccggccgcgccgccgacgctgagcctgaaaagcttcctgcgcaaagagatcgccgaagggctggtggtggtgcgcgacgaagcgcagcaaagcgtggtgatcctaaaaggcgacgggctgttcgactccgccgccaccacggtgcgcgccaactatatcccggtcatcgaccgcatcgccgccgccatgaacggcgtcagcggcaagatcctggtcaccggctacagcgacaacctgccgatccgcagcgcccgtttcgcctccaactgggagctgtcgctggcgcgcgccgaagcggtcagcgcccgcttgcaaaaacacctcgccaacccgcagcgggtcaaggccgagggccgcggcgagagcaaccccgtcgcgccgaacgataacaaagtgaaccgcgcgttgaaccgccgggtagaaattacgctgttggtcgccccggaaaacacccaggcggaaatcaacggcttgccgcaaggaaccggaaagtaatgctcagtacgttattctccatcatcaccagccgcctgctgtggggctttgtcggcattaccgcgctggcgttcatcatctggatgatcggcccgctggtggccatcggcgactatcgcccgctggagccggaactcaaccgccagatcgccattggcgtcatctacctgatctggttcctgtgccgcctgatcccgcgcctctacagcgcctggttcaacagccgcctgctgagcaacctgcgcgccgccgaaacggtgccggcggaagacggcaagcccgaggttaaacaagacgatcagctggcgcagcgcttcgacgaagcggcgcagctgctgaaaaaggcgcgcttcgcaccgggccagggcgacggcaaacaccgctggatgacccgctttagccgccaatacctgtaccaactgccgtggtatgtgatcatcggcgcgcccggtgccggcaagaccaccgcgctggtcaattccggcctgcacttcccgctggcggatcgcttcggcaaatccgcgctgcgcggcgtgggcggcacccgcaactgcgactggtggtttaccaacgacgccgtgttgctcgacaccgccggccgctacaccacccaggaaagccagcgcgaagaagacgccggcgaatggcaaagcttcgtcgcgctgctgaaaaaatatcgcacccgccagccaatcaacggcgtgatggtcaccatcagcgtcgccgatctgctgagcgacagcgccgaagcgcgcgccgcccaggccagcgcgctgcgcaaacgcctgatcgaactgcacgaacagctgggcattcacttcccggtctatgtgctggtgaccaaaaccgacctgctcaacggctttatggcctatttcggcagcttcgacaaagcgcagcgcgaccagatctggggattcaccttcccttacgaacgctcgcggcagccggacttcaacctgaacgccgccttcgaacagcaatacgccctgctgcaacaacggctggatgcggcgctgccggatacgctgctgatggagcacgacgcgcgccaacgcgccgaaagctatctgttcccgcaggaattcgccgcgctgcgcccgctgctcggccactatctggaacaggtgttcgccacctccagttttgaaacccgctttaccccgcgcggcatctatttcaccagcggcacccaagaggggctgccgttcgaccgggtgatgggcgaactgaaccgctacctgcagctgccgacggccaactcaggggcgcaggccaacgcggcctgggacagcgtgggccaggaaacgccgatcccggcagccaaaggccagagcttcttcctgaaagagacgctggaatcggtgatcttccaggagtccgggctggcgggcagcaaccgctggtgggaataccgcaaccgcgccctgcactgggcgggttacatcgcgctggcggtggtcctggcggtgctggcgatgctctggttcaccagttacggcaacaacaaggcctacctggcggaagtggccgccaaggtgcccggcgtcgagcgccaggggcaaaacctgacgcaggtgggcaacggcgacatgttctcgctgctgccgttcctcaacagcctgctgcacctgccggacagccagaacttttcgctggacgatccgccgttcacttaccgtatggggctgttccgcggcgatcaggtcggtgacgccggcaatgccctgtatcaaaaagcgctgaaagagctgctgctgccgcaggtggcgcaacagatcgccaccacgctgcgcaacgataaccacggcgacgcggacttcagctatgaagctttgaaggcctatcagatgctgtatctgccgaagcagtacgacggcaaattcctgcgcgcctgggtgatgctcaacctgcagcgcaacctgccgcagggcagcacccaaaaacagctgcagcagatcgaatggcacctgagccaactgctggatgcgcagatccaggcctcgccctacgccaaagatgaacagctggtggcgcaggcgcaggccgccatcaatcgggcgccgctgtcgcagcgcgtctatggccgcctcaagcgcttgctgctgaaacagaccgacatcaagccggtcagcctggtcgatttggccggcccgcagaccgagctggcgttcagccgcaaaagcggcaaaccggtcaccgacggcgtgccgggcctgttcacctcgcaagggtactggaaagcgttcaacgacaacatcgatccggtgaccgataccctgcgcaaggaagacgtctgggtgttgaacagccagacgccggagcagaagagcgccgatttgaccaagaccatccgccagctgtacatgcaggatttcatcagcgcctgggatgagctgctgggggatatccaactggccaacatcggcaacctgacccaacgcatcagcagcgcgcgcctgctgtcaggcaacccgtcgccgatgcgcaacctgctggtcaacgtcagcaaaaacgttaccctgcgcgacgagaaaagcgacgccgattcccgctcgctgctggccaaaaccgaagacaggctgaatcaaaacgccaaccgcacgctggaggcgctgttcaccaaccggccggccaacgccgacggcgacgtgtcggcccagccggaacagctggtgatggcgcacttcgcgccgctgctggagctggcgcaaagccagggcgaaggcaataaggcgatccctttcgacagcgtgctgaaacaggtcgatgagctgtacagctacctgacggcggtgcaaggcgcggccaacagcggcatgtcggcgccgccgagcgacatcatcccgcgcctgcaggccgagtccggccgcttgccggtgccgttcaaacagatgctgctgtcactggcgatcggcgccagcagcgacacccagcgcaaagagatggagaacgtgaaaaagcgcatcagcttcgaggtcggcagcttctgccgccaggcgatcgccgggcgttatccgctggtggcccgggcgcgccaggaagtgacgccggacgatttggcgcgcatgttcgcgccgaacagcgggctgatggacagcttcttccgcgacaacctgcagggcaaggtcgacactacccgcgccaactggcgctttacccccggcgtggacggcaagacgctgcccggcggcgaaggcatcttgcgttcgttccagcaggcgcagcgcatccgcgacgccttcttcgccaacggtaccgcgacgccctcgtaccgcgtgaccgtgcggccggtgcggatggataacgacatcctcaacctgacgctggatatcgacgggcagctgttcaaatacagccacggtccgcaggtgccgctggtggtcagctggccgggcacccgcaataccaaccaggtgcatctgcagctggcgctggccaacggcaccaccgccagcctggtgaccagcgggccgtgggcgctgaaccgcctggtggatatggcgcagtcttcgggcaccggcggcctcggccgtcaggcgacgttcaatctcgacggccaccgcgtcacgctggagttcacgcccaacagcattcgcaatccgttccaactgccggccttctcgtgcccgtagccccgaaaggacatgaccatgagcactgattcaagcgccccgacgagcatcggctggtacggcaaacttccttccgccggtgacttcctgcaacgccgtttgcctgacccggtgatcaacaactgggcccactggttccataacgggctggtgaatttgcagcgcgatgcgcaggggccaaacgatcacccgttcagcaacgcgccggtgtggaacttcgtgatccccgccacgctcggcagccagtacgtgcagatgggctgcctgttgccggcgcgcgaccgcgtcgggcggcgttaccccatctgcgcgctgcgcctgttcagccaacaggattggcgcccgcaacagctgaacatggcggcgagctggtaccaacagctcggccataccctgctgaacggcgtgcgcaacggcttctccgccgaacaaatcgaccgcacgctgcaggcgatcccggcgctgcccagcccgccggcggaagcggactccgagatattgtcgattatcgggttccagcatccggacgtaccgggcctcggctggcaacaggccgccgactgtttcgatccggcgcagtacaccagcttttggtggaccaatcaggccgacggacacccgctctacacccacgtgcacagcggcaacctcaccgtgcagctgttttcactgctgttcgagcccaacggctgggcgcgccccggccgcggcggccagtacccgcaaatgtttgattaacatcgctcgttgaaggaaattttatggctatcgacaccgataccctgctggccccggttgacgcggacacgccctgcggcgacaacctggaatacgacgccgactttctggccatggcgcgcgccgccaccggcaaagccgaacagcaattcggcagcaccatcattccggaagaagcgccggattgggtgcaggtcgagcgcctcgcaagctcgctgctggcgcgcaccaaagacctgcgcgtcatgctgtatctcacccgcgcctggacccagctgcgcggattgccgggctatgccgacgggctgacgctgatccaccaggcgatactccgctactgggatgccctgcagccgccgctggagttcgacggcgaggccgacccgctgtttcgcatcaacgcgctggccgaccttggcgacaaggccgcgctggccgccagcgtgcgcgccgcgccgctgctgaaaagcgccgccggtgaaatctcgctgcgcgatgccggcgccctgctcgacggcagcaagcaagagtgccccaactttcccggcggccgcgcacggctgcaggatgagctggcgcaacaggatcgccccgaaggcgcgctggtgatgcacatcgccaacaccctggccgccatacgcagcgaagtcacccgccatctgggtgaaagcgcgctgccggaaatgagcgcgctgaccaaggtcttttcgctggtggcgctcgccggccagagcgaggccccggccgccaccgaagcggacgccacacaggaaaccgccgctgagcagccaccggccgccgtgcagagcgcctctgccccactcaactggcgcagcgcgcagatccagtcgcgcgacgacgctcagctgatgctggacaaggtgaaaaactattttcgtcttcatgagccaagccacccggcgccgctgatgatcgatcgggtacagcgactgattacgctggactttatgcaaatcgtccgcgatttggcgcccgatgggcttaaccaactggagaccattctcggtcgccccgaccacgaggagaacagctagccgccgacttttgttctcttgacgacacccgataccgtctgcccctgcgcagacccgaatcagaacctgactctcccagccggacgaggcgcgttcccaatcgccattagatggagtaaatcatgtcaaactcgaaatcccgcagcgggcagaaattcatcgcccgcaaccgcgcgccgcgcgtacagattgaatacgatgtcgaaatttatggcgcagagcgcaaaatccagctgccgttcgtgatgggcgtgatggcggatctggtggggaaagcggtcgatccgcaagccagcgtggaagagcgcaagttcatggaaatcgacgtcgacaacttcgacgagcgcatgaaatcgctgaagccgcgcgtcgcttatcaggttgacaataccctgaccggcgaaggcaagctgaacatcgatctgaccttcgaaagcatggaagacttctcccccgccgctatcgcccgcaaggtcgacgcgctggacaatctgctggacgcccgcacccagctttccaacctgctgtcctacatggacggtaaaaacggcgccgaggagctgatctccaagatcctgcaaaacccggcgctgctgaaatccctgaccgacgcgccgaagccggcggttaacgatgacaacaacgagcgtgaggattaatcgatgagcaactcgcctcagcaacagaatgcgttgcaaaccaccgagactttttccagcgatgagttcagcgcgctgttgaacaaagagttccggccgaagaccgatcaggccaaagaagcggtcgagaacgcggtgaaaacgctggcgcagcaggcgctggaaaataccgtcaccgtttcttccgacgcctaccgcaccatccaggcgctgatcgcggaaatcgacgaaaagctgtcgcagcagatcaaccagatcattcaccacgacgatttccagaagctggaaggcgcgtggcacggcctgcactacctggttaacaactctgaaaccgacgagatgctgaagatccgcttcatgagcatttccaagcaggagctgggccgcacgctgaagcgttataaaggcgtgggctgggatcagagcccgatcttcaagaaaatctacgaagaagagtatggccagttcggcggcgagccgttcggctgcctggtgggcgactactacttcgatcacagcccgcaggacgtggagctgctgggcgaaatggccaagatcggcgccgcctcgcactgcccgttcatcgccggcaccgcaccgagcgtgatgcagatggagtcctggcaggagctctccaacccgcgcgatctgaccaagattttccagaacaccgagtacgccgcctggcgcagcctgcgcgaatcggaagacgcgcgctacctgggcctggtgatgccgcgcttcctggcgcgcctgccgtatggcatccgcaccaacccggtggacgagtttgacttcgaagaagataccgacggcgcgacccacggcaactacacctggaccaacgccgcctacgccatggccgccaacatcaaccgttcgttcaaagagttcggctggtgcaccgccattcgcggggtggaatccggcggcgcggtggagaacctgccgtgccacaccttcccgagcgacgacggcggcgtggacatgaagtgcccgaccgagatcgccatcagcgatcgtcgcgaagccgagctggccaaaaacggctttatgccgctggtgcaccgcaaaaactccgacttcgccgcctttatcggcgcgcagtcgctgcagaagccggcggaatactacgacgccgacgcctctgccaacgcccagctttccgcgcgcctgccgtacctgttcgcctgctgccgcttcgcgcattacctgaagtgcatcgtgcgcgacaaaattggctccttccgcgagcgcgacgacatggagcgctggctgaacgactggatcatgaactacgtggacggcgatccggccaactcctcgcaggaaaccaagtcgcgcaaaccgctggccgcggcggaagtgcaggtggaagagattgaagacaaccctggctactacagcgccaagttcttcctgcgcccgcactaccagctggaaggcttgaccgtttccctgcgcctggtgtcgaagctgccttcgctgaaacaaaacgacgcgtcctgatggactgaagtcaggccgcggtagtgcggcctggctgatgtatcaatctcatcgtcagcctatcgcagaaaacccggctcgcatgtggaaccaagataacgcgaaataattaagcattgagccattagcacttaatagtggctcggtaacccgtaccgatagttttcggtatttaagaaggtgcatggcacaaggatataaattggtaatgcattaccacacttgcaattcctgctgctattacctgagtttttcaacgtaacgttaatactactgttaacccttaataaagagtgaagaaactatggctattgatatgttcctgaaagttgaaggtgccagcggcgaatccaaagattcgaatcacaaaggctggaccgacattacttctttctcctggggcgcttctcaaccgggcaatatgggcgttggcggcggcggtggcgccggtaaagtgtgcttcaacgatctgcacgtcaacgcgctgatcgacaagtcaaccccggccttgctgaaacactgctcaagcggcaaacacctgaccaagattgagctgtcggtttgcaaggcgggcggcacccaggttgaatacgcaaaaatcactctggaagacgtgctggtcaccgccgtgcagtacaccggtgcaggcggcgaagacaccgtgggcgtcacctactccttccaggcggcgaaagtgaaacagcagtactgggagcagagcgacaaaggcggcaaaggcgccgaaagcagcgcaggttggaacatcaaggaaaaccgcgaagcttaattgttatacaacctccccattatggggaggttggtttggcaagcgatgttttttagataaggaaatcatgatgaaagcgattagaaaaggtgacagaggaaatcacgtaaaatcattgcaagaattgcttaataaacagggggctattcttaactctgatggcatattcggtctaaagactgaattagcagtaaaaaaagtgcaacgtaaaaaaggtctgcatgttgacggcatcgctggtcgaaaaacattcttagccctgggttcacacgtcgaaactcgagcaccacaacctcctatcggtggtagtgcaggtcgtcaaggtcccggagctatgggcatttcacaaagcggtttaaggtttatctttaacattgaagcatggcgcggagtaagtaaccacctacattggcctggcggtgcaagcggggtcactctggggccgggttatgatatgaaagctcgctctatagaatcaataaaaaataccatgatcgcgattggattagacaacgcaactgcagataaaatcagtgcagccgccgggttacatcatcagcaagctaaagacttcgcgaaagaaaatcacaatttagtggttttaaccgacacacaggaaacggaactacttaaatttatagtacctgcctatgaaagagctgttaggaataaaattcttgttccactcacacaacaagagtttgatgcgttagtctcctttgcttataatccaggtggtcgactcaacaacgtcgcagcattcattaatcagagcaaaatatctgatgcaatgacagaaataaaacgtgccattacctcaggtggaaaagtgatgaaagggctgataaacagaagaaattacgaagtcgagctctatttaaatggaaactatcgctaaggaattcgccacaatgaaattatctgcatttttaattagtagcgtatttttctcacttactgcatgtgcagcagaaaaaaacgttaatgccccaacatcatcaactattgatggcttatggcaagtgactcaggtcaacatagacaatgagactacccgcacgcttagctatcaatttaacgatcctcgattactaggaagagtgatcaatatttccgctcaatcaatagaaaacaatctgccggaaaaagacgtctgcacagcgccaaccttaactattgagagaagcacgctaaatcaattcatcggcaagtcgatgggcggagataaaagcatctcggctaaaaactatgcattgaaagaaaacggccaaacagaagtctctcttttcaagatcgcttgtcactccggatcattcggcccagccgataatggtgcaggctccagctttgccgctctcaatccacaaaaaatgctggttaattggtacgatggttcgctactgcaattagaacggttaccgaaagatcctaaacctgcagcgtctttcgactgtgctaaatctacaagcgttgttgaaaaaactatctgctcagacttcaatttatccgcctatgacaaaagcgtttctcaagcttggctgttggcaaaaaagcaggcggccgatgcaggagataaaaaactggtagccactttaaacagcacgcaaaaatcttggttactgcaaagggataaatgccgtgatgacaaagactgcctggccgataccatgcaaaaacgaatcgatgaactcacatcatacgattaaaactgtattcctactcacgttggcggtattgaatactgaagcttccgccaacggaaagtattcccctgccgagtacctcagaaactacgcgcttagcgtttgtatcgccgaggggtactcagcaaaagaagtcaaaaacgatgccgccgccaccgccaggggttacatggagttcggcgattactctctggaggcacataccgccgtcagggcgctggcaaaagaatttctggcaaagccctatgacagcatgtctggggagccgatgacgatggccaagtgcatcgatcttgtacatagccaagcgttgcaagccatcatcaagaagtaccaagggaaagacgacaactgataataaatacgcatccttacatataataaatgttagtttagaaaaataggaaaggaatcctgatgcaatacaaaacaaaagcagatctggatagatctgtcgataaactcaaaaaactatcaagaacgttttcacgacagtatctatacaccaacgaatcaagagctaatttttcactggaaatagaccaacttattcagtttgcacaaagggatatcagtatacactgcacatcctactctggggcaattagtataattgaagaggaaatcaacaacctcaaacaacaagaattcagcattaatacaggtaaagccaagctctttgtcgcaataaaaaaagaaaaaagagaaagattttcaaacctggtgatgaaacaagttggttttgtcagcggcggctctcagatatttgccggaatcggaacctgtgcactttctgcaggcatggcctgcgggggcgttggcgtaccgttaatggctcaaggagcaaataatgtttacgaaagtggctattatttacttttcagaaaagataagattggcagtataagagaggcataccactacgcggctaactatctaggctataataaaaatgaagctgacatcgtttatagttccgttgacatctcactatccgggtacggtatatttagcaagtcattaagacctgactcctggcggttgtttaaacacataaatagcgattatattattggatggaaaaagcttggcacggttccattaggcgcagaggttttttccaatgccataactggctatggaatttacaaattaatcgatgaggaaacaaaacagtgatcgatgacgtcacgctttccacctactcttactcatttgtgtttttatactttttcctgtcagtcttagtatttgtcgggctttatcacctaaaacaaaaaaccaacaataaaaaatcctattctctttttgtgatggctaccatagtgaatttatttgcaagcatcatccagggtttagtgtttaactatggttctgagatactggatccaatgctcaatataaaatttcaagactatgatgaggtgtggtacgccagtattatattcgcccttacttacctgtctcaattaccaactaatctctattacaaaagaaaggctaagaataatgcgaataatagcaatgacatcacctgacatatacagtctcacgttattatattgaagttttcgaccatataatgcgttaacccaaaaaattagtcactcacattcaaagatctctcttaggaaagaaattaagtcaaactcatccagttatcgagttccactgtctggccataagatctaatcagcaggaatgccttatgcgattttccattgtaaaaaataaaagcggccaggttccgccgcagagcagttgcgattttctgccgccgggcggcaccatcggccgcagcgtggacaacaacctggtgctgccggacgaagagcgcgccatttcccgcctgcaggcgatcgtgcatatttccgctgacggcgaatgccgcatcaccaaccgtggcaacgtcacccgcgtgctgctgaacgacattccgctggagcgcggccgccaggttgaactgcaggacggcgacgtgctcggcatcgacgattaccagatcgaagtcagcgcactgcagcaacacgccgcgccgcaggctcaaccggtggccaaggtcgccgccgttgccgctgctgcggcccctgcagccgccgccaaagaaaaatccgccgcgccgatccccaacgaaatctgggacagcctggtggaagaatttacgccgaacgcgccggccgccgtcacaccgccgccgatcgccaatccggacaatcatccgctgctggatacccccgctcgcgagctgaacccggccgatccgctggcgcagctggcgggcgatgtcgatctgcgccaactgcagcaacagcaaaccgatccggccgccttattcaacaccgactccacttttgagcgtgagcatatcctggccgataccacccccagcgcgctgctggcggagcaggctgcgccgccgcgcccggctccccccgtccagaatgcgcagcaaccggaacaagagctggatccgctggcgctgttcggcggctcatccgcgcccgcttcgccagagacgctgaacagcaacgatccgctggggctgctgatgggcggcgccgtgccgctggctcagccggaggaagcggtacagccgccgtccccaccaccggcgccgatcgccgcccagccggtagcgccgcgccctcagccgacgccgccgcccgtgcagagacccgagccgcaaccccaacccgcgccgcagttcagccagcaggaaccgcctgcgcagccgccgcgtccgcgccagggcaaccgcctgggcatcgatccggttgcctaccagtccgctcagcggcagcacgccgccgcgccgaatggcgacaccttggaggggccgctgctgacggcgctgctgcaaggcgtcggtcttgacgatctgcagccgcagccacatttcgacgaacaacagatccgcctggccggtcgcctgctgagcctgttctcgcaaggcaccgtcgccctgctctcatcccgctcgatcctcaagcgcggcgtgaaggcggagatgaccatgatcctcgacgaggccaacaacccgttcaagctgctgccttcgggcaaaacggtgctgatgcagatgttcggcagccagatgccgggctttatgccgccggaacaggcggtgcgcgatgcgctgatcgacctgcaggcgcaccagctggggatgatcgccggcattcgcgccatcatcgccgccatgctgcagtcgtttaacccggaacgtctcgaagaagaagcgcgcaaggaaggcgtggcgccgcgtctgtcgctgcccgccaaccgcaaggccgcgctgtgggactacttcgtgaagaactatcagcaaacctccggcgaaatcgaggacgatttccacaccctgttcggcgaagccttcctgcacgcctatgacgttgaagtgaatcaatacaaagactcacagaccaaaccggacgcgtaatgaatatcaccatagcctctacctccaaccagggcggccgcgcctccaaccaggatcagaccggcgaggtgctcggcaaccgcgccgcctgcttcgtggtgtgcgacggcatcgccggttttccgggcggcgatatcgccgccaaactggcgcgcgacaccattttgcaaaacttcgacggcgaaaagcacctgaacgcccagagcattcgtcagcacattacgcgcgccaatgccgccatccaccagcaacagcggcagtcggacgaatacagcaagatgggcaccacgctggtcagtctgtttatcgatcgcgattaccagctggcctactgggcgcacgccggcgacagccgcctgtacctgttccgccgcggctacctgcatgccgtcaccaccgaccacagcctgatccaacagatgcaggacgccggttatcagaccaacggcatcaacagcaacctgctgtatttcgcgctggggctcaacgaagagcgcgacgccacctacagcgacgtgctgcagctggaagacggcgacgttttcctgctgtgcaccgacggattctggcacagcttcagccaggccgaactggaacagtcgctgcacatggtcaactcccccagcgagtggatcgccctgatgcagcaggcatggaagaaaaacaataacagcgataactacagcgctatcgccgtctggattggctcaccgcaggaaaccaccctgctgcattcgctggcggatgcggagcggtttctgagccgcgactgagcagcgcacattcacagcaaggttcactatgaaatattggatgccggggctcgtcgccctgatggcggtgccgaccgcgcaggcgatgaactatcgcctggtttactcccccagccagaagctggaagtgtttatcgatgacgtcaaaaacagcaatccggcaagctggtgcggcaaaagcatcccgctgcgtatcgtctcggcgcaaagccaggatccggcggtgctgaacgactttctgccgcgcgtcggcaatctgttggaaaagcagtgcccgaaagccggccacctgccctggacgctgaccgacaagcgcggagagaaactggccagcggcgaagccgccaaagcgcgcggctggaaaccggtggtcaaacaagcggcctccgagccgccggaaaccccgccgcaaccggcgatccctgcggcggtggccgtgacttctccgcaggcggacagcgcgccggctcagcgtttcagcctgccgcagggctgccacttccgcaccttctggcgtgacgaggccaacggcggctcgctgttcattcccgccggcgctgcgctgcgctgcggcgaggacgggtggctgcagggcagcggcgcggtcacgctgcaacagggcggccaaaccctctcgccgacgctatggttcctgcaaggttacccgctggcgcaggttaacggcggcgatcgcgcgctgaccgtcgtcagcgccaacgcccaacggctcattttgggcggcaacccgcaggcgccgggcagcttcctgctgctgaacttcgaaccgaagctgcacgcctgggcgttcaacggtgaagcgatcgttgaaatgccgcgcgtcgacgccgccgacgagaacaagatcaaacagcgcgtgcagcaggcgcaaaccgcctggcagccgctgctgagcgcccccgccccgctgactttcaaactggtggaaaagctggccgcagaccgggttgatcccgccagcggcagctacctgtcggttagcggcgccactcactgattataaggaaagcctgtgaaatcattagcaagcatgctgcgaggccagtcgatcggcgcggccatcaccgccgtcgaaaacgatatcaaggcgaaaccggcggatgccgacctgcgcgccgcgctggtgcaactgctgtgtctgagcggcaactggacgcgcgccaacgcgcagctgaaatcctggcaggcgctgaaaccgatcgcacaaccgaccacgctgctgctgatgcagtcagtcaacgccgagctgcaacgccaggcggtgtttgccggcacggccgcgccggcgctgctgcggcaggatcagccttggctgaaactgatggtgcaggcgctgcatcaggatgcgcaaggggcggccgaacaggcccaggcgctgcgtgatgaagcgctggaggccgctccggccggcgccgggcggttaacgctggccgaaggcgaacaagaacggcagctgcgtttcgactggctgaccgacggtgacggccgcctcgggccggtatgcgaactggcgctgaacggcgtttactactggctgccgtttgccgacatcgccgcgatccagttccaggcgccgcagagcgccatcgacctggtgtggagccatgcgctggtgcgcctgaccgatggccgcgaacaggtatgccaactgcccgcccgttacccgctggcagaaggcagcgacgacgcgctgctgctcggcaagcgcaccgaatggcaaccgctgggcgacggcacccactatgcggggctgggcctgaaaacctggctcagcgaaagcgatgaattcccactgcacagcctgcggcagttgagcttcgacgcgagcgcctgaccatgaacgataagcgcccaccccactacgacggcggcgatctgcgccaccagggctatcgctatcgtcaggacagcgaacgcctgacctcgcgcgacaaaatgcagccggtgctgctcgatatgctgaccgacgacgaaccgcagaaaaagcaggaggcgcaggtgcgcaacctggtgtcgcacagcgagctgcgccgccgggtattgcgcgatctgcagtggctgttcaactgcgtcaacagcgaatccaatctggatctcggcgattttccgcaggtgcggcgctccaccctgaattacggcatcgcctcgctggcgggcaagcgcatgtcggacatcgaatggctcgacattcagcgcgcgctgaccgaatccattctccatttcgagccgcgcattttgcccgaggggctgcaggtgcgctgcatctcggataccggctcgctggagctgcacaacgtgctgtcgatcgaaatcaagggccgcctgtggtgcgtgccctatccgctggagtttctgttccgtaccgacgtggatctggaaaacggccacttcgatctgaaagacatagggtaaggcgatggacagtaaactgttagattattacaaccgcgagctggcctatctgcgtgagatgggcgccgagttcgccgaacagtacccgaaggttgcgggccgcctcggcatgcgcggcatcgacgtggcggacccttatatcgagcgcctgatggaaggctttgccttcctcacctcgcgcgtgcagctgaaaatggacgccgagttcccgcgcttttctcagcgcttgctggagatcatctaccccaactacctgtcgccgacgccgtcgatggcgatcgccgagctgcagccggacagcagtaaaggcgatatcagcaacggcttcgtggtgccgcgcggcaccatgatggacagccagacgctgaagaaaagcggcatcacctgcagttacaccacggcgcatgacgtcacgctgcagccggtgcgcatcgccggcgtcgagctgggcggcattccggccgatatcccgctggcctcgctggggctgcagcacagcggctgcgtcagcgcgctgcgcattcgtcttgagtgctacgaaagtgtgacgctcaacaacctgcagctggatcaattgatgttttacctggccgggccggacatgcaggcgcagcagctgctggagttgctgatgcagcacagcgtcgggcttgtctgccaaacggtggaggctcagccacagcggcgggcgctggcgttggacgggctgcgacaggagggcttcgccgccgatcaggcgctgctgcccaacgatctgcgcaacttcgaaggctaccggctgctgcaggagtatttcgccttcccggcgcgcttccagttcttcagcgtcaacggcctgcgtccgctgctgcagagcgtgcgtgaagggaaaaaggggctgcgccagttcgagatcgtggtgctgctcgataggcacgacgccgcgctggaacgggtggttgacgttgctcacttggcgctgcactgcacgccggtgatcaacctgtttccgaaagtggccgaacgcatcgcgatcaacgaaaagaaccacgaataccatctggtggtcgacaatatccggccgctggattacgaagtgttttcggtgcagcggctcggcggcagcgccagcgaaaaacgctacgagcaagagtttcggccgttttacagcaccctgagcgcggacgacggcaactatggcgcctacttttcgctgcggcgcgaacagcgcacgctgtcggagcccgcccgccgctacggcacccgcaccggctacgccggttcggaagtgttcgtgtcgctggtggacgaacggcaatcgccgtggcacagcgatctgaaatacctcaccgccgacgtgctgtgcaccagccgcgatctgccgttgatgctgttgcaacaggatcagggcaacttcgtgatgcccgattcgatcccgatcaagcaggtctcgctgcgcaaaggccccaccccgccacgcccggcgctggccgaagggatgatcacctggcggctgatcagccagttgcagctgaactacctcagcatgatggacggcgatccggaacagggcgccgccagcctgcgccagctgctggggctgtacggcaacctgagcgagccggcgatcgccaaacagatccagggcgtgcgccactgcaacctgcggccggtctatcggcgtgtgccggagccgggcccgatcgtgttcgcgcgcggtatcgccatcgatctgacggtcgatgagcaggcgttctccggcaacagcccttacctgctcggcagcgtgctggagcgcctgttctcgcgcctggtggcgatgaacaccttcaccgagatgacgctctccagccagcagcgcggcgaaatcgcccactggcaggcgcgcatgggcaaaaggacgctgatatgagcgcggagatgatcgccaccgaactggcgccgccgcagatcaatgcgctgtatcggctgccggacgacttctggccgcggctgcgcagtgcgccttacaagcacgatctgtttcaactgctgcgacgcatcgacgcccagggcggccagccctatctgctggggcgcgcgccgctgccgcgccacgagatgctgcgcctgggccaggagccgtcgctgtcgttcgcgccctccacgctggcgcaggtggcgccacgcgccaacagcccgctgcacgacgtttcgatcttcagcttcggcctgttcggccccaacgggccgctgccgctgcacctgaccgaatacgtacgcgaacgggtgtaccaccatcaggacaccaccctgctggcgttcaccaacctgttccatcaccggctgacgctgctgttttaccgcgcctgggccgacgcgcagccgacggtatcgctggatcgcccggacaaccggcgcttcgacgagtatctgtcgagcctgatcggcatcggccagccggcgcaacaggagcgcgacagcatcaacgcccacgccaagcattttatggccggtcatctgattcgccacagccgcgatccggaaggcctgagcaagattttgcagcagtatttcaaggtgccggtgcgcatcgtcgaaaacgtgccgcactggctgcgggtggaaccgcgcgaacaggcgcggctcaaggccgggcgcggtgcgccgcggctcggcgagtcggcctttctcggcatcgcggtgcgcgatatccagcacaagttccgcatcgagctggggccgatgccgcagcaggactatgaccgcttcctgccgggcgccgagctgtgccggcaactgcgcgactgggtgcgccaatacctgggcatcgagttcgtctgggaagtgcgcctgatcctggcgaaggaacaggcgcacggcatccagctcggcggcgcgcagcgattgggcctgagcagttggctggccgaccatcggcgacagcgcgatctcgacgatctgatcttcagccctgaaccgctggaaaacccgttctgaccctatttcggccgacgccctgcggcgccaggccaccctgagacctgaggaaaaccatgtctgaaatcagccgctcggtattatttggcaaactggatagcctgttattcacctctctggaaagtgcgacggcgttttgcaagctgcgcggtaacccctacgtcgaattggcgcactggctgcatcagctgatgcaatcgccggacggcgatctgcagcagatcgtccgccacttcgcgttggacgaggcgcagctggcgcgcgacatcgtcgaggcgctcgatcgcctgccgcgcggcgccagcgccatctccgatctgtccgagcacatcgacagcgcggtagaacgcgcctgggtctatggctcattgaaattcggcgcggcgcgcatccgcggcggccacctgctgctcggcattctgaaaacctacagcctgcgccatctgctgaaggccatttccccgcagttcgagcgcatcaacgccgatctgttgatggagcagttcgccgtcattaccgctcactcggcggaaaacgcccaggatgcgccggcggaaagccgcgccgagaacgcatccggcgcggcgcgcagcggtgaaagcgtgctggcgcagtatgcccaggatctgaccgccagagcgcgcgacggcgagatcgacccggtggccggccgcgatgaagagatccggcaaatcatcgatatcctgatgcgccgccgccagaacaacccgctgctgaccggtgaggccggcgtcgggaaaaccgcggtggtggaaggcctggcgctgcgcatcgtggccggcgatgtgccaccacagctgcgcgacgtgaaactgtgcctgctggacatcggcatgctgcaggccggcgccggcgttaagggcgagtttgaaaaacggctgcaggcggtgatcgacgaagtgcagtccagcccgacgccaatcatcctgtttatcgacgaaattcacaccctgatcggcgccggcggcgcccagggcaccggcgacgccgccaacctgctgaagccggcgctggcgcgcggccaactgcgcaccattggcgccaccacctggtcggaatacaagaaatacatcgagaaagacccggcgctcacccgccgtttccaggtggtgcaggtgcacgaaccgagcgaagacaaagcgctgctgatgctgcgcagcaccgtcagcccgctggagcaacaccaccgcgtgctgctgctggatgaagcggtggacgccgcggtgcggctgtcccatcgctatattccggcccgccagttgccggacaaggcggtggcgctgctggataccgcctgcgcgcgcgtggcggtcagccaacacgccgaacccgcccaggttgaagactgccgccatcgcatcgatgcgctgcagatcgaattggatatcgcccgccgcgaggccaaggtcggcatcggcgatcccctgcgcccgcaggagattgaagctcagctgaccgcgctgcgcctggagctcaaacagctgaccgagcgctggcagcaagagctgacgctgatccaagagatcatcacactgcgcgcccagctgcaccggcaggaagcggaggagcctgccggcgaagaaacggaggcgggccctgacgccgacgcgctgcgcgcccaactgggcgagctgcagcagcaactgagcgcgctgcagggcgaagcgccgctgatcttcgccgccgtcgacgccaacatcgtggcggcggtggtggccgactggaccggcatcccgctgggccgcatggtgaaaaacgagattgaagcggtgctgcaactctccgccaccctgaaccagcgcgtcatcggccaacgccatgcgctggatctgatcgcccgccgggtgcgcacctcacgggcgcggctggacgatccgaacaagccggtcggggtgttcctgctggccgggccctccggcgtcggcaaaaccgaaaccgcgctggcgctggcggaaaccctgtatggcggcgagcagaacgtcatcaccatcaacatgagcgaattccaggagtcgcacaccgtttcgacgctgaaaggcgcgccgcccggctatgtcggctacggcgaaggcggcgtgctgaccgaggcggtgcgccgccgtccttacagcgtggtgctgttggacgagatcgagaaagcgcacccggacgtccatgaaatcttcttccaggtgttcgacaagggctggatggaggacggcgaaggccgccatatcgatttccgcaacaccatcatcatcctgacctccaacgtcggcaccgatctgatcgccgggctgtgcagcgatccggagctgctgccggagccggaggcgctgagcggcgcgctgcgccaaccgctgctgtcggtgttcccggccgccttgctcggccgcctgctggtggtgccgtattacccgctgaccgacgccacgctgggcaacatcgtgcgcctgcagttgggccgcattcagcgccgtctggcggagaatcacgacatcgtctgcaccttcgacgacgcggttatcgagcagatcgtcagccgctgcaccgaggtggagtccggcggccgcatggtcgacgccatcctgaccaacaccctgctgccgcagatcagccacaccctgctgaccggcagcgccaacgaccagcgctatcgccagctgcatatcgcgctgcagaaccacgaattcatttgtcaatttcaggcataacgccgcggccgccgagacggcggccctttgaacacagagagtcatcactatgtcgggaaccgggataaccaaaccgaattcgaacagcctgccgagcggctatcgattcaacgaattcgagatccaggaagcgatcggcgaaggcggcttcggcatcgtctaccgcgcctacgatcaccaactggaacgcaccatcgccatcaaggagtacatgccaacctcgctggcgaaacgcaacgacgatctcagtatcgggctacgcggcgagcgcttcggcaaaactttccaggccgggctgaacagctttattcaggaggcgcgtctgctggcgcgcttctcgcaccccggcctgctgcacgtgttgcgcttctgggaagagaacggcaccgcctatatgggcacccagttttacagcggcaccacgctgaaaaacctgcaggcgcagcagccggagaaaatcgacgaggcgtggatccgtcggctgctgccgccgctgttcagcgccatcaacaccatccatcaggaaggttatctgcaccgcgacatttcgctggataatatccagatccaggagagccagctgccggtgctgctggacttcgggtcagcgcgcaaagagatcggcaacctgtcggacgaaacggagatcatgctcaaaccgggcttcgcgccgatcgagcagtacaccgagaacagcgacggcgaacaagggccgtggaccgatatctacgcgctgggcgccgtgctgcacacgctgatcgtcggttcgccgccgccggtcagcgtggtgcgcagcatcgaagacagctaccagccgctgaccgagcgccgccccgccggctactcgccggagctgttgcgcaccgtcgatcgcgcgctggcgctgaagccggaagaccgcccgcagaccatcgacgaaatggccgagctgttgcacctgccgatcgccgatgaaaacgaaatcatcagcaccccggccgccgcgccggagaacttgctggtcgccgccaacccggccgccgctgcggccgccgccggcgccgttaccgcgcgcggtacccaattctcacgcccgatgatggccggcgccggggtcgccgcgctgctggtgatcggcgcgatcgcctggctgagcggcggcaaggacgacgcccaggccgtcgcccaaaacaccgtggcgtcaccggcgcagaaaaccctgacggagcaggcgagcgcgccgcaaaccgcgcagcctgcggcggcggaacctgaaaaagcggcgccgccggcgcaaccggtggcgttggtgtacttcaaactgcaaccgggtgagcaggtcagcctcgacggcaagccgcagcaggtgacgccgggcgaaaacggcttcgccagcctgaacctggcgccaggccgttatcagttggagatccgccacaacgatcggctgcgccgccaacagctcagcatcgacaccgccggcacctggctggtcaacccggccaccgccggttaatcccgttctgaaactccgccgcggcggggttttccctatttcatgagactgacgagcaactgccccctcattggccgcgcggcaaggccgctgcaacgccggagtatgcagggcatgacgtcaatcacagaggatgttctcatgttggatcgcattattgcgcacacgccgctgggccaggagcaactgctgttccgctcgctggacggcatcgaagcgctttccactcctttcgacttctctattgaattgctgagcaccgacgcgcggctcgatcgcaaagcgctgctcggccaaccgctgacgctggagatccctacccagggctttctcagcgccccgcgctacctgaacggcaagatcaccgccatcgccgtcagcagcgaagagatcggcggcacgcgctacgcggtgtataacctgcacgtgcagccggatctgtggccgatgaccaaagaccgcaacttccgcatcttccaggaacagacggtgccgcagatcgtcaagaccctgctggcggagcacaacgtgcagctggaagatcagctgaccggcgactatcgcctgtggggctactgcgtgcagtacaacgaaagcagcttcaacttcatcagccgcctgatggagctggagggcatctattactatttcaaacacgagatgggcaagcacacgctggtgctcggggatgcgccccaccaccaccagccttatcccggctacgagatgatcccctaccatctgacgccgtccggcggcagcaccagcgaggaaggcatcagccagtggacattgtccgatcgcgtcacgccgggcatctacagcctggacgactatgattttcgcaaacctaacgcctggctgttccaggcgcggcaaaacccggtctcccccacgccggggcagatcgacgtttacgactggccaggccgctataccgagcatcagcaaggggagttctacgcccgcgtgcgccaggaagcctggcaggccgagcatcagcagatccgaggcaccgccaccgccatgggcatcgcccccggcagcacctttacgttgtataacgccccgcacgccgacgacaaccgcgagtacctgacgctgcaggccaactatcacctgaaagagaaccgctacgccagcggcgacgatcagagtagcgaacaccgtatcgacttcaccgtgctgccggcggacgtgccctggcacccgccgcagcaggccagctggccgaaaacccacgggccgcagaccgcccgggtggtcggcccggccggcgaatcgatctggaccgataaatacggccgcatcaaggtgaaattccactgggatcgcttcgggccgaaagacgacggcagctcctgctgggtgcgcgtctccagcgcctgggccggccagggctacggcggtgtgcagatcccgcgcgtcaacgacgaagtggtggtggactttatcaacggcgatccggatcggccgatcgtcaccgggcgcgtctataacgaagccagcatgccgccgtgggcgctgccggccgccgccacccagatgggctttatgagccgcaccaaggacggcaccgccgacaacgccaacgccctgcgtttcgaagacaaggccggcgccgagcaggtgtggatccaggcggagcgcaacatggacacccaggtgaaaaacgatgagagccacaccatcgctaacgaccacacccacctggtgggcggcaaccagatcaagcgggtggtgctcaatcaggccaccggcgtcaaaggcgaatcctccgcgctgaccggcaaaacgcgcagcgacgccgtggtcaatgcctttaccctcggctccggcgaatcgctgcggctcgagtgcggcgaaagcgtgatcgaactgctggcggacggccaaatcaacatcaccggcaccagtttcaatatcacggtgaaagaggatggcgcgatcaacaccggcggccagctggatctcaaccagcctggcggcgccgcacgcaccgccgcaccgggtggcggccatcaggcggcaatccagagcgccgtcgatcagttgttccctaaagagtaggtaattggtacgccgggaaagccggttaacgccgccccccgggcggcagtaccggcaaaaacgccgtccgctgtaacccttttggcaaggagatgaataggctggcggcaaaatcactgacgttaagccaacacaacgggctgaatctgtaccgcccatcgattcagccttctttatcatttccccttcaccacttcttcaccgtctggtaaatctcgaggtcgaaatagccgtcggcttcgcagtcgttgagatagtgttcatagctcaccccctcaaccggctggtagccgctggccggcagcagcttctgatagaactcgccccacacccgctcgaaatcgccatcgctgatgcgcacgtggtagaccgcatactgcccggcgggcagcgtctgcacggtgacgccctcgctgcccgccggcagcgcgaaatcgtccgccacgctcatcaccacgtcggcgcgcagcttttccggcgccacttccgccggatcgtcccaatacaacaccagccatttgccgaacggcacgtcgtggcgctgccgccatgccaacagttgctgcgagccctgcgggatggtctgcggatacggccccacgactctcactcccaccaccttctccgccgccttatcgataatcctcacgctcatcgcccttccccctcacaatgtctcaggcgccgatttcggtacgtacgtccagcaactcggggaaaaaggtcagatccaacgcctttttcaggaaactgacgccgctggagccgccggtgcccgacttaaagccgatgatccgctccaccgttttcatatggcggaaacgccacagatggaaactctcttcgatatccaccagcttctccgccatttcataggcttcccagtaggtttgcgggttgtcgtagatcactttaaacgccggcagcagatccgggttgcgctggtagggctgcgtccagtcgcgctcgagacactcctgcgggatcggcaagccgtggcgcgccaggtacagcaagtattcgtcgtacaggctcggcgcttcgaggatcgccttcagcgcggcgtgcttttccgcgtcgttgctgaacaccgccagcatggcggcgttcttgttgccgagcaggaattcgatcgaccggtactggtgcgactggaagcccgacgaactgcccagtacgtcgcgaaactcgacgtattccgacggcgtcagcgtttccagcaccgcccactgctcgaacagcagccgctggatctgtttgacgcgcgcgaggattttaaaacagtggctgagtttgtcttgctgcaccagccgcagcgccgcctgcagctcgtgcagcatcagtttcatccacagttcggaggtttggtgctgtatcacgaacagcatttcgtcatgatgcggcgggttggagagcgggtgctggcagtccagcagttggtccaggcacaggtagtcgccatagctcatgcgtttggaaaaatcggtgacaatcgcgctttctaattcccgtttgttcatctgtgatctccgttgcgcccagcgccccatcggcctggaacgtgccgcaaagagaaaacaatagtacagaacccgccgccccgaagggcgataaacgagagatgcttcgcagatctcactcatctgcgttaacacagtgcccccaccccgctgttgtttagtaaacaacacggctgccgcctgacgactctcacaaatgcgcgatcccatgcacgcggcgccccggttgcagcttgcctgcggccggcttcccttatagattgcaggctaacggcaggcagcaaggtagcggcaaatggcaaatattcgtgatgtggcgcggttggccggcgtgtccatcagcagcgtgtcgaacctgctgaataatcgcagtcaccagatgagcgcgcagacccgtgagcgcatcgaacgggcgatggcgaccctgggctaccggccggctcaatcggcggcggcacccgcgccgcaggcgaaaatcatcggcctgctgctgccgtcgatcgttaacccgagcttttcggcgctggcgcatgcggtcgacggcgcggcgcgggctcaccgctaccgggtcttgctcggcaacgcctaccgccaggagcaggaggaggccgcgtttatcgacgatatgttcctgcacggcgtgcgcggcatcatcgtggcggcgagcgacattcgccagacccattttgttcgggccgccgagcgcggcatgaagattgtcagctacgacagcccgtttgccgaacagatggccaccgatagccggctgttcgacagcgtgtcgatggacaatatcgccgccgggcgcctggccgcacagcacctgctcgaacgcggctgccgacacatcgtgttcgccaccgaagcgacgctgaccgtcgggcgcagccacaagatcgacggttttctgagcgccctggggcacagcctgagcgaacgccaacgggtgatcgaaggcaaggccaccagcgcctacggcgacacggaaatgttcgaattggggctgacgctggcgccgcgcgttctcgcgttggcgccacgcccggacggcatcgtggcgattaacgatgcgttgggcatcgggctgatggtgggcctgcgcgccgccggcgtccaggtgcccgcagacatctctgtgatcggcatcgacaatatcgcgctggccggcctggccgaaccggggctgacgtccgtgcggccgccgctggcggagatggcgcagctgatggtcgaacgcctgatcggccgcatcaacaatgattcgcaaccgcccggcgagtttctcttcccgccgacggtcatcagccggcgctcggtcaaaaccgccggttaatacggtaaaaacgactttcccagacgatgcgcagtcggcatcgtccggatcgtcacagctaaaagcagaaaaaatagaatcgtcgcaataaataaacggcgcgacgcttttatgcacgcaacgtcgttattcagctctccgctcattgctttgggccggaccgctattattccgattaaccacatgggaaaaaccatgatgaaaaaaataatgccaaaggatattgaacgcagcgccatcaggaaattgacgctgcatatcgtccccctcatgattttattgtatttcctggcctttctcgaccgtaacaatatggcctacgccgccaaagcgctggaagataatttgggattgaccgcctcggccttcggcttcgcctccggaattttctttatcggctatttcctgtttgaaatacccagcaacgccggcaccataaaattcggcccgcgcatctggttcgccagaatattaatttcctggggcatcttcgcgaccctgctcggttttgtgcgcacgccgctggagctgtatatttgccgttttatgctgggcgtgtgcgaagccggtttctttccctcggtggtgtattacttcacggtgttcttcccggaaaagtaccgcactaaaattctcggcatgttcatcatcgtccaaccgctgtccaacgcggtcggctcgccgatttccggctttattctcaatattcagcatgactggttcgggttcgccccctggcagctgctgttcatcctcgaagggctgccgccgatcgtcatcggcctgttgatcccgttcctgatcaagaactcgcccaaggacgtcggctatctgaacgtggaggaaaaggcctggctgatgagcaacgccggccgctccaaatccggttcaaaaatcacgctgggcgacttcctcaagggcattaaaaacaagaaatacctgctctacgcgctgctcaacttcggcatggtgtgcggcatttacggcttcggcacctggctgccgtcgatcatcagcgccatttccggcggcgatatcttccgcgtcagcctgctggcgctcattccctacggcctggccgcgctgctggtctatccgtggagtctgtgggccagcaaaaccaaaaaactcggcgtgttcgccggcctcagcatggtgatcgccgccatcggcctgatgggcgcggtgacattttttaaatacgacccgttcgtcgcgctgtcattcctgtgcatcgccgccatcggcatctataccgccgtgccgccgttcctatccatgcccgccaacatttccaccggcgcggccgcagcagccgggctggcggtggtgagctgcatcggcaatatcggcggtttcgtcgctccctatgcggtgggcgtgctgaacgatctgaccggcagcagcgcgccggggctgtttttcctggcttcgtgcctgctggccaccgggttgatctgcattttctactgcgccaaacagcgtgaaggcgtcatcaattcttaacgaaccaataaggagtcaatcatgggcgatcttgcgggcaaaaaggtctttatcaccggggcggagcagggcatcggccgcgccaccgcggagcggctgatcaaggccggttgcgacatctattttcactatcacagcgacgaaagcggccccaaagcgctggtggcgctggcccattcattggggcaaaaggccgcctacggctacgccgatctcatcgataccgacgaaacgcagcgctgcgtcttggccggcgccgagttgctcggcggcatcgatatcctgatcaataacgtcggcggcatcgtcgggcgcaaatggctgggcgagatcgaccgcgccttctggcaaaccgtgatcgacgtgaacatgaccaccatgctgaacgtcacccagagcgcgctcccgcacctgaaagcggcgccggacggcgccagcatcgttaacctggcctcacaggcgggccgcgccggcgggcacgccggctcgctggtctattccgccaccaagggcgcggtactcacctggacgcgctcgctggcggcggagctcggcgagcacggcatccgggtgaatgcggtggcgcccggcctgatcctcggcacccgtttccacaatcgccacaccacccaggcatcggcggacgaaaccgttcgcgccatcccgctgggccgcgcaggcacaccggacgacgtggcgcgcgccatcgccttcctggcggcggaatacgacggcttcatctccggcgcgactctcgacatcaacggcggcatctaccgcatgtaattcagctgcgggcggcgcgcttgccgcccgcccattcaggaatcgctttatgatcaaatccgccatcactcacccgccgctgctcgccgcgctggcgcaatgcgggcataaaacccaggtgttgattgccgacggcaactacgcctgcatgacgcatgcgccgaaagacgccaccgtggtctatctgaacctggcgcccggcacgctcgccgccccgccaatcctggaaaaactgctggcctgcatcaacgtggaaagcgcggcgctgatggcctacccgccggacttcaccaacactatcgaagccgaataccggcagttgctgccagaacattgcccgatcgagcacctgccgcgcgaggcgttttacgccgcggtcaaatcggatcgaacgctgctggtgatcgcctccggcgaacagcgccgtttcgccaatctgctgctgacggtggcgccggtggtgtgaaagaggtagagggtgtgaggggtaaaatgagggggccagccccctcatgccgttacaggtcagcgacccacttctccagctcccccgcacgttccgcatcgatatagctggtggcccagccaaacaggtaagcgaaggcgaaaatgcccaccgtcgacgacaccagcgtcggcgcgaaaaacgcggcgatagcggaaagcgtataccctacgccgatcgacaacccgagcgcttcgagctggttgcggaacgctttccagttgccggttgagaaaccttcaatcgcggcgtttaccagatccgcgcctttgatcgcccaatccaccccggtgaagaccttgcctaatacccgcgcattgcgggcatactgttccgcatcgatcattttcagccaggtgacaatcgccgctttgtcctgcgccttaagctttttgttcaggcccttcgtcaattgctcgtaggttttctccgcatcttgcacgttgcggatatattttccttgtattcccgcctccaaatccttggcgagtttggcgtatttcgcgccgatcttttccgcgatatctttattgatacctgcggccaggctgacgccatccttgatggcttttaattccgcattttgatattcgacgaattccttaacgatcgtttttaccgagccgggcgattttaccggtttgccgttggcatatttcacctccatggcattcaggttatcccctctcaccacggcgataaacgcgggccggttcttattggccttatagtagaggttgtaggtcgccactccgtcttgcttttccaccttcaaatgatgaaaaccgtagtaactcccggtcgtgcgggtcgtcgagaattcgccggttttgccgttgccatgccagccgctgacgggccgatcgcgatgcgagtctgtcacgaaactgcctaacgaagaggcgccgatctgcccggcattcaggccattgttgccgcctttgccaggagttgagggcttgcgcgcatggccggtttcgatatccccgagcgccactgtcacccccttggcgttgacccccatcaccagcccccccaggccaatgtgcttcgcctgctcggccgtcaaaccggtggcggaaaggctcagcgtgccggatgggctgacgctttcaatatgcaatttcgcatccgggttaattctgcgcgccgccttaatcaccgcctccagcttcatgcgcagcgccggatcgttttggatcgccgctatctgttgctgttccgggctgttgccaacgccggcgccgccgcgatcgcgatcgccggaatggcctttatcgccgccccccggctcagggcccgtaccgcgttcagaactccagttagtcccatctcctttaccgccataattaaatccaggcatatgctttcatccttatttcgttttatttttaagatgccgatattctcgtttaacgcggattgacacgcgcattatccctatcggcaaaccgtttttagctgcccgtcatttataaaaaactgcagaaataaggacaacggatggcggctgtctggtcggtgaaacaaataggatcgcgtctgcagaacctgaatatatcgccgcgggacacacctggatggctgcgacctgttcagaagtcattggcacacaccatgaattgcaattacaatcatcgcacttgcaacttaaagagaatgctccgcatgtcgcctcaacgtataacactgcccgccgcctcggccagaacccaaaccctggccgaagcctgtatccgcaagatgacctccgccagccaaaaagccggcgcttcgcgcccttctgccagcgcctggacggcacaaactctgggcgaactcaacgccagcggcgacatctggcttatcgacggcagaaggcgcgccgagccgccgatttcccgctacgccaccgcctggccgctctggtttggccatcaatcagagcgttatgagaagccgctgttttacttcgtcaacacgccctcggtggacatgctccgcgggcttgagccggaaaccaatcgcaaggggattttcatcagcgatgcagataccggcagtgccgatttgccgaaaggcgttcaggcctggttcccgcttcagctcacggccatgccgggctggttgcctttcgatccggccaatgccagagaaaccggcgcgatactccatcacgccctgcgcgcgctctatctggagggaacgagaaagatggtgtatctcgcgaccaacgcagacaatggccccctctcttcaggggagccgtttgtcgcagaacaggcgttcaggggaatgtatcgcgtcgccaccgcggcagactcaccgttgcaggttcgtctgtgcggcgccggccgtgcgctcgcccgcgttcagcaggcggccgaggtattgaaaaactgggggattgcgtctgaaatctggagctgccccagctacacgcggttggcgcaggacgccgaactcgccgacatgcagcgccaggacagcggcggcaaatgccatctgaaaacgtgcctgggtgccgggaatgcccccgtcgtcgccgtcaccgactattcgcacctgattgccaatcagctcaagcgattcattcccgcacgctttgccgcggtgggctcagattcacgggtgcgcggcgaaatccactacccgcaggcggaatggattgcgctctgcgccctcaaactgctggccgacgagcagaaaatcccttcggcgctgatcgccgatgcgctgcgcgttctgcacatcacacccgatgcctgatcactctctggccagctgcatcgcgttgtccaacgcgtcggagaagcgtgcgatctcttcttcgctgaactggttgagaaaatgggtgttgaccaccgtgcggtagatctcccacatctttttccgcagggccttgccttcctcggtgatagtcgcgaaggaggcccggcgatcgtcatccgatcgaaaacgcgtgaccagccgctctttttccaggcgatccatcaggcgggtcaggttgtaacgctcaatcaccaacacgtccgccagctcatgcatgcggcgtgtgccgttttccccgctttccaatccccataacacgtcataccaggcgtaaaccggcagccccgcctccgacaacttcgcctctatctttctgatcatcgcccgatgcgcgcgcacaaaggagaaccacaggtcgggttgtttatctgtcatgtcatttttctcgtcaaaagcggtgagttgcaattgcaattgtaaagggatagagtggctttcgccattattgcatttgcaactcttgcacttgcaattcaataaacccctgtatcgctcagcgccttatcaggtaagtacatttggagcttttatgaaccaacccgtggttaaagcagatcttgacccgcaagagacggctgaatggcttgaggcatttgaaggcgtcaccgatatcgatggccgtgagcgcgcgcattttctgttggaaagaatggccgaagccgatcagcgaaaacacggcgatttcttcagcctggtcaccacgccctacgtgaacaccattccggcttataagcaaccgacgtatcccggcgatctggccgctgaagcgcgcatcaatgcgtttattcgctggaacgccatggcgatggtgctgcgcgccggcaaacattccaacgttggcgggcatatcgccacctaccaatcggccgcagtgctttacgatgtgggattcacgcacttcttccgtgggcgcaccgatgatttcgccggcgacatggtgtatatccagggccactccgcccccggtatttatggccgtgcctatctcgaaggccgcatcgacgaggagctgctcgacaactttcgtcgcgaatccgcgcgccgtggcctctcctcctacccgcacccgcggctgatgccggatttctggcaatatcccaccgtttcgatggggctggggccgctgaccgccgcctaccaggcgcgctacatgcgttatctggaataccgcgagctgaaacctcaccagggaagaaaggtgtgggcgttcctcggcgacggcgagatggatcaaccggaatcgctggcggcgattgcgctgggcgggcgagaaaaactcgataacctgatcttcgtcgtgaactgtaacctgcagcggctggatggccccgtgcgcggcaacggcaagatcattcaggaactggagggcaccttcaaagccgccggctggcaggtgatcaaggtgatctggggcagcggctgggacaaactgctgcaaaaagaccgctccggactgctgatgcagcggatgatggagtgcgtcgacggcgattaccagaccttcaaatcgcaaagcggcgcctatgtgcgggagcatttcttcggcaagtacccggaattgctcgagctggtcgccgacctgagcgacgatgagatctgggcgctgcaccgcggcggccacgatccgcaaaaggtgtacgccgcctaccatcaggcggtgcataccacgggcagaccgacggtggtgctggccaaaaccgtcaaagggtttggcatgggggaagccggtgaagggcagaacatcaaccaccagctgaaaaaaatgagccaggatgcggtgaaagccttccgcgaccgtttagggctgacaatctccgacgcccaactggcagagatcccttacctgaagcctgaacccgacagcgcggcggcgaagtacatcaccgcgacgcgcactgcgctgggcggctacatccctgcccgcttcggccaatccgctccgctggcgataccggaactatcgcgcttcgacggcctgctgaagggcagcggcgaacgcaacatgtcgaccaccatggctttcgtcaatatcctcggcacgctgctcaaagacgccaacatcggcaaactgattgtgcccatcgtgccggacgaatcgcgcacgttcggcatggaaggcctgttccgccagattggcatccattcctggctcggccagctgtataccccgcaagacgccgggcagctcagctactacaaagaggccaaagacggccagattttgcaggaaggcatcaacgaatccggcgcgatatcgacctggatcgccgccggcaccgcctacagcaaccacgatgtcgcgacaatcccgttctatatcttctactccatgttcgggctgcagcgggtgggcgatctcgcctgggcagcggcagacgcgcgcaccaagggcttcctgctcggcgccacctccggcagaaccactctgatgggcgaaggcttgcagcatgacgacggccacagccacgtgctgtcttccgtcattcccagctgcgtctcctacgatccgacctatgcctatgaactcgcagtgatcgttcagagcggcatgcgcaggatgttcgttgaacaagaggatatttactactacatcaccttgctcaacgaaggatacccgcagccgccgatgccggcgggcgtggaggacgggattatccagggcgcctatttgctcaaacagaacgaaacggcaaaccaagagagcccgcgcgctcagctggtcgccagcggcgccatcatgcgcgaggcgctggcggcggcggcgctgttggccgaggactttggcgtcgccagcgatatctggagtgccaccagcctgagcgaactgcgccgtaacggcatggcggccgaacgctggaacctgctgcacccggaagacccgccgaaagtcccttatatacagagtctgctggcggcgcatcctggcccggtggtggtggcgacggactatatgaagatcgtcggcgatcagatcaaaccgttcttgccggaccgcgcctttatcaccttgggcaccgacggctttggccgctcggacacccgcgaggcgctacgtgagttcttcgaggtcaaccgccatttcatcgcgatcgccgcgttgaaactgctggctgacgaaggccgtatcgcccgcagcgaggtcaaccgcgccatggtgctgtatggcatcacccccgataagccggacccggcagcggtgaagtaacgcatagcctacccacgccgccggctgtcacccgcggcgtttttcctccttcggctcggcggcgcgcggctcccgctcccccagccgcaccagcgggatatccgccagccgggtggtgtaagccggcgacagcatttcgcgcttcatttgccacggtttgacgatcccctgcccggcgaaccatacgcgcccgcgcccttcctgattcaggcgatcgagggtcgccatcagccgctcgctgttgcggcgcggcgggcagtcgtcgaacaggtcgatctgcgccatggcggcggcgctgaaatcccccagcaccacgccgcccttcaggtagcgtcgcccttcctgccagatgctctccagcgcgcgcaccgccatggcgataatgtcgcggctgtcgttgctcggcgtttgcagccgggcggtgcccatattgctgtaatacccttcgcccgccgaatgcgggctggttttgataaacaccgacacattgcgacagtagcgcttttcctgccgcagcttctcggcggcgcgttcggcgtagctgcagatcgcctcgcgcatgtgcgggtaatgcgtcaggcgctggccgaacgaacgggaacagatgatctgctctttggccgccgcttcatcttcccattgcaggcatgactcgccgcgcagctctcgtatcgtgcgctccagcaccacgctgaaggttttacgcgccagccgggtatcgcagtccgccagctgcagcgcggtgtgaatgcccatcgcctgcagctgacgggtcaggcggcggcccacgccccacacctcctccaccgggattaacgccagcagcttgcgctggcgcgccggatcggacaagtccaccacgccgccggtcccccgccatttcttggaggcaaagttagccaacttggccagcgttttactcggtgcaatgccgaccccgaccgtcaaatgcagctcgcgccggatgcgatcgcgcacccgatgaccgaacggttccagcgcctcgcagtgcgccacgccgtccagccgcagaaaggcttcgtccagcgaataaatctccaccgccggcgccatctcctccagcgtgtccatcacccggcgggacatatcggcgtacagcgcgtagttggaggagaacaccgcgacgttgcggcggcgcatctcctctttgatcttgaaataaggcgcgcccatcggcacgcccaacgccttcgcctcggcgctgcgggcgatcacacagccgtcgttgttggacagcacgatcaccggccgcccccgcagatcgggccgaaagatggtttcgcaggaggcgtagaagctgttgacgtctaccagggcaaacatggttacagcgccgcgtagacgataaaggtcaccacgccgaagatctccagctgcgcctcgtcgttgaacacgattggcgcataggcggggttcatcggcaacagccgcacgtcggggtagcgctgcagttttttgacggtgaattcaccgtccacggcggcgatcacaatattgccgtgttccggcgtcagggcactgtcgacgatcagcagatcgccgtcctgaatattgccgtcgatcatcgactcgccgctggcgcgcacgaagtaggtggcgttgggatgccgcaccagcagcttgccgatatccagccggctctcgacatagtcctgcgccggggaaggaaagccgcaggccacgcgatcggcaaacagcggtaacgtcagagactcacctggtgaaaaagcatacaaccttgaattgctcagcataatcataaccaaactgtatatttatacagtaaagcataaacaaaacgcgaacgcgcgcaaccccaaattcccctgcggatcgcgctttgccgcgtaatataataattttctgagtgatttttcctgcagattttggcgttcttcacgtgtgtttgcacacatgatacccaccaaaactgtggataattcggcactcagaccgttggcgtatcgatgggcaggatgagtgagggattgtcattgcgaacggcgccgacggcgggcgataccggacgcgcggccgtcggtctctgctgcgtacagcgccgcaaagaacagcagcaggccttgcctcagcaagatcccacgggaggaacggcggacggccttacaaaatgacgccaataaaattgcgactggcaatggcatcaatgggacggccagagacgaaagtcagtacgttatgccaggagcttgggatcacccgacaaacgctgtaccgccacatttcccctgatggtccactgcgagctgacggtataaagctgctcaaccggggataattttagcggacggaaaaatctggggttccggcgtagaaccccgaataaggaataatccttaattcatttcaggattattaattccatctaaaacctcttggcaatattcttttttataggcttcatcattacttaatgacttaaccaaaaaatcagcatttttccaaccattatcccaatgcgtatcgaatcctgactgttcatactttaatgttctagttaatgagtcttttatttgttttttatatttatcaattttctcattggttgccccacaaacatcatgtgcaacacgagcatttgagccagaaaaacctattgctgaaattgccatcgcttcatttgatttgtcgaaatcattcgcatatgccacagcattagataaagcgaatatgacaagagcaggtatggtttttttgtatgaaatcatctttcacctctaactcattgattgttcatggggtcagtttggatatagaaaattattgtacattaaggctgctttttaatcagtctcaacttctttatagaaggcctgaatgcgacaaacttgggaagtactgcagcctgtcgcgtctgctgtttctcggatgctcagtttcttaatctgtcggtagtgcctgatccatcctgctcgctccatctcaccgctggcgcgcacgaaataagtggcattaggatggcgcaccagcagcttgccgatatccagccggctctcgacatagtcctgcgccggtgaaggaaaaccgcaggccacacgatcggcaaacagcggtaacgtcaggggctcacctggtgaaaaagcatacaaccttgaagtgctcagcatattcataaccaaactgtatatttatacagtaaagcataaacaaaacgcgaacgcgtgaacccccctatcccccgtcagaacacagtttgacgcgtaatataataattttctgagcgatttttttttacgcctgctaacggtttcactctgccttgcacacacgttatccactaaaactgtggataacatgctgagctgcagtggcgtcttcagaacatgcgccgtcgcctcaccgctccgccgcggccaggcaaaaacgatgcaccgcttcaaccatctgatcgaggcccggctgctcgaggggataatgcccggcgttctcgagcatcacggtggtcaccggcacccgccgaatgcgccgcagaaacagttcactcaggtgcaacggcgtccagcgatcctgcgccggttgcgtcaacagaaccgggcaaacgtcgaacgcttccggttcaatggcgggtgcatactccgcgtacgaggccaaaaaccgcatcgtcacccaggctcccgccgaggtgttgtccgccaggcacgccttgagcgccgccttgtcattgaccagcgcatgcatcttgctcgccagcgccatcggcatcgccatacccgccagcggcgtggcggccgtcagtcgcgccaacggaatgcccaggcgacccatcaacagattcaatgccgtctcgtcgcgcacctgctgttcacgctgatcgagaaacgtcatgccgacaatgcctttcacctgccggttcaacgccgccacgtggtaagtctccatcccgccggcgctcaggccgtacagcacaatcggccgcgcatccttcgcccgttccgcgtcgatcagatcgctgccgatctgcacccagtcgtcgtaacgcacgcgccgccgttggccgcccatctgcgtcattccgtaccccggcatgtcgacggcgatcgtctctatcccccggcgcgccagcggcgctcccaggatggtcgacatctgtcggccgttggtgcccaccccatggaacaggatcactttcaccggcgcctccgggcggcgatagcagtccagatgaatacggtgctgccgccagggccaccacacctcggtcggttcttcccccggccgcagccgaaaattttccggcaggaatcgttgaatctcctgccagtgagattgattggcgtaattctccatacgaaacctctggcgttatggcgcttggttgacgggttcaatttcagtataatccaacaaatgtcggatcattaaaatacaacttatgtcggaaaaagcgatgccgcaagcaaaaaaaaatgtgcgcgtgccgattcaggaacgcgcggcggcgcgcatggccaaagtgctgagcgccgccgaacagatgctcgccaccctcgggccggaaaaaacctccattcccgctctggcggaagcggccgatgtgccgcgcgccgcgatctacccgttcttcccggacaaatacgcgttgttttcacacctggctcagagccatatggcgcaactggcgcaggcgctgcgtgaagcggagctcgagagcgccgacaccctgcacgattgggtggatgccgccgtggcggccaccgcccgctactacaacgcgcatccggcggcgagcgtcttgctgctacgcggcgcgttcaccgaaccggagcaagaggcgcacgccgccaagaacctgacgatcggcgagatgttccgcgccaaagtgcgcgagctgcccgaacttgatgcgctgccgtcagatcccgacgtcgtcttgatcgccatagaattggcgttcgcctgcatgaaatacggctatgcgcgggaaggcaccgtttcgccggccatttgccgcgaggcgacgcgggcggtcacgagctatctcgggcagtggcgcgccgcgccgtaaggcggtggcaaagacgccccgtttcgccctgttcaagcacgccatctatgataaaatcggctatcactcatcagactctatctgacgccggcgctgtatccgccggcgccgcgaaaccatcatgaacaagcatttgattctcgacgaacccggcgatgccgactcggcctgcctgtcgcgccacgcagtctggcagcgcaacgatctggctcaggcgcaacaagactggctggcggaagaagtgccggtcgccctggtgtacaacggcatttcccacgtggtgatgatggcgacgccgaaagacctggcggccttcgccatcggtttttcgctgtccgaaggcatcatcgcctcccccgacgatatctacgacattcgtcaacaaccggcctgcaacggcatcgaagtgcatgtggagctctcgagccgccgctttatgcagctgaaagagaagcgccgcagcctggccggccgcaccggctgcggcgtctgcggggtggaacaactgcaggaggtcgctcaacccgtcgcgccgctgcccttcacgcaacgcttcgatttggccctgctcgaccgggcattggcgcagctgcaaggggtgcaaacggtagggaaactgaccggctgcacccatgcggcggcctggatccaaccggacggcgcgctcagcggcggatgtgaagacgtcggccgccacgtggcgctcgacaagctgctgggctaccgcagccaacaggcgtggtggcaaggcgcagcgctggtctcgagccgcgccagctatgaaatggtgcaaaaatccgccatgtgcggcgtcgagatcctgttcgccgtttccgccgccacccgcctggcggtggaggtggccgaacgcagcaacctgacgctggtggggttcagcaagccggggcgcgccaccgtctatacgcatccgcagcggctctggcaatcgacgacgacggcataacgccgccggataagaatcgactattctcaatagcaggacaccaggaagcgccaacgtcatgataattcgcccgaaccagaactggttttttcgcctgttcgcctggcacggttccgtgctgtcaaagatcacctttcgcctgtcgctgaacgtgctgatgtcgatagtggcggtgatcagctaccaatggtacgagcagctcggcgtgcatttaaccatcgcaccgttcagcctgctgggcatcgccatcgccatctttctcggctttcgcaataacgccggctatagccgctttgtcgaagcgcgcaacctgtggggttcgctgctgattaccgagcgctccctgctgcgccagatcaaaagcctgctgccggacgaaccggcggtgcagcaaaaggtcgccaagctgctgatcgctttcagctggagtctgaaacatcagctgcgcgccaccgatccgaccgccgatctgtaccacaatctcagcagcaaggagctggccgaagtgatcgccagcccgatgccgaccaaccgcattctgctgatgctgggtcaggagatcggcaaactgcgccatcagggcctgctgagcgacatcaccttcgagctgctcgacaacaagctgagcgagctgtcccacgccctcggcggctgcgaacggctcgccagcacgccggtgccgttcgcctataccctgatcctgcagcgcaccgtttacctgttctgcagcctgttgccttttgccctggtgaccgatctgcattacatgacaccgtttgtttcggtgttcatttcctataccttcttatcctgggactcactggccgaagagctggaggatccgttcggcgtgtcggccaaccatctgccgttaaacgccatttgcaacaccattgagcgcaacctgctggaaatgaatgaccaaagcccgctgccaccgccgatgaaacccgacgagcactttaatttgatctgagctatttcacccgaacacactggagccgaatgcaatgaatgcaaatacccccctgccgcaagccgtattcacgccggtgacgcgccatgccatctttatcgtcgccaccctgtcgcccgttcccgcccatctggcggcggtgcgcgcctggtgcggcgacatcgccgccgtggtgcgttcggtcggcaaacgcgcgccggcgggtaacctcacctgcgtctgcggcttcggctccgaggcctgggatacgctgttcggcgcgccgcgccctcgccagctgcatccattcagcccgatcggcagcggggaacgcgtcgccgtcgccacgcccggcgacattctgctgcatatccgcgccgatgaaatggatctgtgttttgaactggcctctcagctgatcggcaagctcggcgacgccgtaacggtaatcgaggaggtgcacggcttccgttacttcgatcagcgcgccatgatcggcttcgtcgacggcacggaaaacccggaggggcacgaggccttcgactacacggtgatcggcgacgaagacgcggcgttcagcggcggcagctatgtgctggtgcagaaatacctgcacgacatgcagggctggaactcgctcagcgtggaaacgcaggagaagatcatcggccgccataagcagtccaacatcgagctggatgaagcggtcaaaccgtcgtcgtcgcacagttcgctgaccaccatcaccgacgagcaaggcaacgaggtgaaaattctgcgcgataacatgccgttcggccgccccggcctgcgcgaattcggcacctactttatcggctacgcgcgctctccgcagccgatcgagcagatgctggaaaacatgttcatcggccgcccggccggcaactacgatcggctgctcgatttcagccacgcggtgaccggcactctgttcttcgtgccttccgctccgctgttggaagcgctggccgaccgcagcggcgccgaactgcattaatccgctcgccctacagcagcagcgccagctccatcgccgtgcgctgcagctgcggcagcactcgttcgcgcagctccgccgccgagatctgcgacgcattgacgccaacgttcatcgccgccacaaccccgcctttacgtgaatgcatcggcaccgcaatggaacgcaggccgatctctaactgttgatcgttgatggcatacccctgtctgcgaactctggctaactgttcctgcagctgctccgcactggtgacggtaaactcggtcagcggttcgaaagtgacccgcgacagataatcctccagctctccctcgtccagcgcgctaagcaacaccagccccatcgatgtcgcataggccggcagacggctgccgcgccccagatcgatagtcatgatgcgtttaaccgaggcccgggcgatatacaaaatgttatcgccatccagcgtcgccaccgagcaggattcattaagcaatttgctgagatagtccagcgagttttgcgccgccttcgccagctcggaagaggaaagataagcgtgaccgatagttagcacacgcggcagcaagcgatagtggcgcccatcgggacaatgcacgaatcccagcgctcgtagggtatacaaacaacggcgcaccgctgcgcgcggaatgccggtttgttgactgatctctgacaccgacatctgcgaatactgtggcttgaaggcctgtaacacctccagccctctggccagcgaggccataaaattaggatcgcccttgtactggtcgttgcttaaatcaccgatctcctgcagccgacgcagttcttcggtgccaaattcaggaacttcactcattcaggcctcccattagtatctgctctcaatttacacgctcaatacggcagcaaagccctgcgtatcgcatccgatgccgatttagctgcctgcatcacaaaatgcagacctaaaccctcaatgcaccgataatcgcacaatgttctgatattcgcacttgctgatgcttttttcatcctctaggttaatttcaaacccgctatttgttggcgcaacgtcccaaccgagccttgaggagaactgatgatcgataaaagcatggcgtccgcagacgccgccgtcgcagatattccggatggcgccacccttatggttgggggattcggcccggccgggcaaccctacgcactgttggatgctctgatccgtcaccggccacgcgcgcttacgctgatcagcaacaatgccggcaacggcgattttggtctggcggctctgctgaaagccggctgtgtgcgcaaagtagtgtgttcttttccgcggcaggctgattcttgggtgtttgacgacctctaccgccgtggcgagttggagctggagctggttccgcaaggcaatctggcggcgcgcatccaggccgccggcgccgggctcggcggtttctataccccaaccggctatggcacccaattggcggaagggaaggaaacccgcgagatcgacggccgccgatatgttttcgaactgccgctgaaggccgacttcgcgctgatcaaggcagaacaagccgaccgttggggcaacctccgctatgacaaaaccggacgcaacttcgggccgattatggcgatggccgccaactgcaccatcgtcgaagtcaaccatatggtgccgttgggcgaactggatccggagaacatcatcacgcccggcatcttcgtacaacgcctggtgccctcttctccccgtgcagcacggctttcggcttaaggagcgcatcatgagcaaactgacccatcaacagctggctgagcgcatcgcgcgcgatattcccgaaggcgcctacgtcaatctgggtatcggcattccaacccagatcgccaactatctgccggccgataaagagatcttcctgcacagcgaaaacggcattctcggcatgggcccggcgccaacgccgggcgaagaggacccggaattgatcaatgccggcaaacaaccggttacgttgctgaaaggcggctgctttttccaccacggcgactctttcgccatgatgcgcggcggccatctggatatttgcgtgctgggcgcctatcaggtctccgaacgcggcgatttggcgaactggagcactggcgcaccgggggcgattccggcggtcggcggcgcgatggatctggcgatcggcgcacgtcaggtgtttgtgatgaccgaacacctgaccaaaacgggtgaatgcaaaatcgtccgccaatgcagctatccgttaaccggcatcggctgcatcgaccgcatctacagcgatctggcggtgatggacgtcactccccagggactggtggtgcgtgaaatatttgccggcctgaccccgcaacaactgcaggacgtcaccccggtcgcactgactttcacccttcaacacggggaaccgcgccatgaatccagcttatctgtgtgacgccgtccgcacgcccttcggtcgcctcaatgggagcctggccggcatacgcgccgacgacttggccgctctgccgttgaaagcgctgcaggcacgccatccgacgctcgactggagccaggtggacgacgtgttgttcggctgcgccaatcaggcgggggaagacaaccgcaatgtcgcgcgcatggcgctgctgctcgccggcctgccggtgcaggtgcccggctgcaccatcaatcgcctgtgcggatccagcctggatgcggtagcagctgcggcgcgcgccatcagaaccggcgagagcgagctgatgatcgccggcggcgtggaaagcatgtcgcgggcgccttatgtgatgggcaaggcggaaagcgccttcagccgcacgatgaagattgaagacaccaccatgggctggcgttttatcaacccacagatgcaggcgctgtacggcgtggacacgatgccgcagaccgccgaaaacgtggcatcgcaattcggtatcagccgtcgcgatcaggacgccttcgccctgcgcagccagcaacgcaccgccgccgcgcaggaaagcggcttttacagcgaccaactgatcgaagtgcttatcccgcagaagaaaggcgagccgctgaccttcaaccaggacgaacatccgcgcgccaccaccttagccgcactggaaaaactcaggccggtggtcgccccgcagggcagcattacggccggcaacgcatccggcctgaacgacggcgcctgcgcgctgctgctggccggcgagcgcagcgtggctcgccatggcctgcggccaatggcacgcatcgttgccagcgccgtcaccggcatcgaaccggcgatcatggggtttgccccggcggcggcggtgcgcaaagtgttgcatattgccggcctgaccctcgaacagatggacgtgatcgaactgaacgaagccttcgccgcgcaagcgctggcggtgacccgcgagctgggactgcgcgacgatgcgccgcaggtgaacccgaacggcggcgcgattgcgctcggccatcctttgggcgcctccggtggccggctggtgatgaacgccgcctggcaactgcgaaaaacgcgcgggcgctacgggctgtgcaccatgtgcatcggcgtcggtcagggcattgcgctgattatcgaacgggtatgaggtcaatcatggatattgaatatcgtctcgacggcccggccgacgcaccgctgctggtgctgtccaactcgctgggcaccactttcgagatgtggcaaccgcagttggcggcgctgaccgaacgctttcgcctattgcgttacaaccagcgcggccacggagccaccccgttggcgaaagcgccactgcaactgcagcagttggctgaagacgtcatcaccttgctcgaccatttggatgcgccgaacgcccatttttgcggcatttcgatgggcggattgaccgggctctggctcagtcgttatcaccccgagcgcatcggccggctagtggtcgccaataccgccgcccgcattggcgacgctgaaggctggcgacaacgcgcgcagcaggtacgggaacacgggttggcgccgatcgccgccgcctcccccgcgcgctggttctgcgcggcattcgcgcagcgccaccccgagcaggtggcggcgctggtggcagcgctggcggccggtaatccacagggatacgccgcctgctgcgaggcactggcgcgggccgacctgcgcgccgagattgccttgatgacgcggccgatgcgggtgattgccggtgagcaagatccggtcacgacggtggcggacgccgagtttttagtcgccaatgcgccactcgccgatctgcggcggttgccgacatcgcatatttccaacatcgcctgtccggatctcttcaaccgctgcgttgtcgagtttcttactgaaaaggaatgaagcatggaacttcgcattgaacgcatcgacagctggctggtggatattcccactattcggccacacaaattgtcgatggccacgatgggctgccaaacgctgacgctggtgcgcatgacctgcgccgacggcctgatcggctggggggaagccaccaccatcggcgggctgagctacggcccgcaaagcccggaggggatcaagtcggcgatcgacggctacctcgcgccgctgctgagcggcaaaagcttcagcggtctggcgccgttggttgcgttgatgaatggccaggtccagggcaatacctttgccaagtcggcgctggaaaccgcctttctcgatgcccagggcaaacgcctcggcctgccggtcagcaccctactcggcggcgcgctcagcaacaccctgccggtgctgtggacgttggccagcggcgatacgcagcaagacatcatcgaagggcaacgcctgttggcggaagaccgtcatcgcgccttcaagttgaagatcggcgcccggccgctggaggaagatctgcgccacacccaggctatcaagcaagcgctggggccggagatcagcattcgcgtcgatgttaaccaggcctgggatgccgccaccgccgtacgcggaatggcggcgctgcagcagatcggcatcgatctggtcgaacagccggtgccgcaatgggatcgcacggcgttaatccggctcagtcagcgcttcactctgccgatcctggccgacgaagcggtggccgacgctcacgacggttatgcattggctgcgggcggctttaccggcgcctacgcgctgaagatagccaaggccggcggcccggcgcaggcgctgaaactggcgcaggtcgcacaggccgccggagtcggcgtctatggcggcaccatgctggaaggcacgctgggcaccgtcgcctcgctgcacgcctggtcgacgctgaagctggactggggcagcgagatgttcggcccgctgttgctgaaagacgacgtggtcaccacgccgctgcgtttcgccaacggtcacgtcagtctgccgtcaggcccgggcctgggggtcgatatcgatgaagacaaactgcgcttttatcgacgcaaataactacgagggactacgccatgctattcaaagttgaaatggtcgtgaaattaccgctcgatatgcctaaagcgctcgccgacgaaataaaaacgcgcgaaaaagcatattcgcaaaccctgcaggcgagcggaaaatggcgacatctttggcgcgtagccggtagctacgccaatgtcagcattttcgatgtggaaagcaatgccgagctgcacgagctgttattcgccctgccgctttacccttatatgaaaatccgcgtaacggcgttatgccgacacccgtcatcgatccgcgacgatgacaaataaaataccgggataataacccgcaaggttagctgttaattcctgttctctgtataacctacattataagcaatgaggaattcgcaatgtctatatccttcaatcaacgtcaagacattatcaaattgctggaaatcagcagcggttttactaatgataacggagatccgcgtttcaaaaaaatcatgcatcatctgctgggcgatatttgtcagctcatcgatcgctatgatatttcccctgaggaattctggcaggcgatcaactatctgcacgtcttgggcgaacaccaagaggcggcgctcctggccgccggcttgggactggaacactacctcgatctgcgcgacgacgagcgcgaacgtcaacaagggctgagcggcggtacgccacgcaccatcgaggggccgctgtatgtggccaatgcgccactgagcgccggcttcgcgcggatggacgacggcgacgacgacggcgaggtgatgtggctgcacggacaggtcaaaggtgccgacggcaagccgctggcgggggcggtggtcgatatttggcacgccaacacgttgggcaactactctttcttcgataaatcgcagagcggcttcaacctgcgccggcggataaccaccgacgccgatggccgctacgcggcgcgcagcatcgtgccgtcgggctacggctgcccgcccgatgggcccactcaggctttgcttaatcgactgggccgccacggcaaccgtccggcgcatattcatttcttcgtctccgcaccggcgcataaacacctgacgacgcaaatcaatctcaatggcgaccgttatctgtgggatgacttcgctttcgctacccgcgatgagctgatcgccaacccggtgaaaatcaccgatccggcgctggcggcaaaacgcgatctgcccggcccgcataccgaagtgcagtttgattttacgctttatgccgcggcggaccgcatcgagcagaacagaataaatcgccctcgcgcgctgcaagattaatatttttcgcacaaaagaatagcgacgctaataacgggcaatcggttattgattgcccactgccccgtctatccattttctatgaggccatgaatatgcattcattattgaatccgacaatatctaagctgaaagaaaaaataaatcacgctttaattattgataaagaaaatggcatatatcagtgcaatcgcggtatttttaccgatgaggcgctgtttgaactcgaaatgaaagccattttcgaaggcaattggatttatctggcgcatgaaagccaaatcgccaactcaggcgattattacacgctcaccattgggcgtcagccggtgatgatcacgcgcgacaaagacatgcggctgcatgccatgatcaacagttgctcgcaccgtggcgcgatgttggccagccgcaaggccggcaataaaagtaccttcacctgccccttccacggctggaccttcaataacgccggccacctgctgaaagccaaggacgagaaaaccggcgcttatcctccctgtttcaagcgggacggctcacacgatttgaaacagctgccgcgttttgaatcttatcgcggatttctgttcggcagcctgagcgatgaggtgcaaccgctggaggagtatctgggtgaaacgcgacagatcctcgatctcatcgtcgatcaggctgagagcgggctggaagttctgcgcggctcatcctcctacaccttcgacggcaactggaaactgcagatggagaatggtgcggacggttaccacgtcagcgtggtgcactggaactatgtctccaccatggcgcatcgggatgccgccagcggcatccaaaccatggacgccaactgctggtcatcaaaaaacgacggcggcgcctatggcttcaagaatggtcatctgctgttgtggacccgggtgctgaacccggagtcccgccccatttatcggcacttcacccgtttgaacgatgccttcggcgcacaccgtgccgacctgatggtgaaccaaacccgcaacctgtgcctttaccccaatctgtacatcatggaccagctttccagccagttgcgcgtagtgcgcccgattgccgtcaataaaaccgaagtgaccgtattctgctttgcgccgaagggcgaaaacgccgacgagcgagccttgcgcattcgtcagtatgaggatttcttcaacgtcagcggcatgggtacgccggacgacctggaggaattccgcgcctgccagctggggttcaacgccggcaacatgccctggagcgatctgagccgcggcgctacccgctggctggagggccaggctgacgacaacgccaaagcgctggggatcgtacctgacatgaccggcccccgcccggaagatgaagccctgtatctcagtcagcatcatcattggcaaaacattctgctgcgccagctggagcgccagcaacgaaacgacgaggtggcgcaatgagtacatgtaacctgcaacagcggctggaacaatttctgtaccgcgaagcacgcctgctggatgaccggcagtgggatgactggctggcctgctaccatccgcaggtcgaatattggatgccggcctgggctgacgacgatcgccagacgacggaccctcatagcgagatttcgctgatttattacgccaatcgcgaaggcctggaagatcgcgtttatcgcataaaaaccgaacgctcagccgccagcagcatgccggagccgcgtacggtgcatcttatcagcaacgtggagctgttatcgtccggcgcggaacaggccgaggtgaactaccactgggccaccttctatcaccgctacaaccacacggacacctatttcggctcaacccgactgtggatagatcttagcggggaggcgctgcaaattaagcgcaagaaaattcgtctggataatgactatatcaatcatgtaattgatatttatcatctttaatgcaggaggtgaggtatgtcttttaccgtggcccttaattttgaagacggcgtcagccgctttattcaatgcaacccgaatgaaaaagtactcgacgccgcctaccgacaaaagatcaacctgccgatggactgttcggacggcgtatgcggcacctgtaaatgccactgtgaacaaggagaatatcagctgggcgatgactatctggacgaagcgctgtcagagcaggaagccgcacagcggcgagtgttgacctgtcagatggtgccgctctcggactgcgtcatcgaggtgccgatgccttcgacgatgtgtaaaaccgccagcgaaatgtttaccgccaccgtcgcctccgccaccgccctgtcggacagcgccatcgagttctgcctgacgctggatgatgaacgcggcatcgcgttcctgccgggacaatatgtgaatatcgacgttcccggcagtgcggccagccgcgcctattcgttcagttcgccgcccggcagccggcagctctcttttctgctgcgcaacgtgcccggcggcatgatgagccgttatctgacagaacgggcgagccccggcgacgcgatccgtctgcgcggcccacagggcagtttctatctgcgtgcgccggtgcggccgatgttatttttggccggcggcaccgggctggcgccgttcctttccatgctggaatatctggcgctcggcggcagcgaacagccggtgcatctaatctacggcgtcacccatgaccacgatctggtcaagctggaacagctggaggcgtatcgccagcgtctggcgaatttcagctatctgacctgcgtggccagtgaaacgtcgttttcgacgcataaagggtatgtcacccagcatctcgacgaaagcctgcttaataacggtgacctggatgtgtatctgtgcgggccgccgccgatggtggaagcggtgcttggcgatttccagcgacgcgcctttatcccgaatagcttccattatgagaagttcgcccccagccaggccgatcagaggagttgaccatggataagtcacgtttcagcggccaggtaatggcgataaccggtgccgctcaaggcatcggcaaagcggtggccgaacgcgcggctcgggaaggggcgagtttggcgctgatcgatcgctccccctatctggaggaggtcgtagccgttttacgcgagcgcggcaccgatatcatcgccctgcaggccgatttggagcattgggaagaagcgcgcgatgcgctggatcaggtgcaacagcactttgggcgcgtggatattatggtgaacaatgtgggcggcaccatctgggcgcgaccatttgccgactatgcgccgcaacagattgaggcggagattcggcgttcgctgttcccgacgctatggggttgccgcgccgcgttgccgcatatgctggcgcaagggagcggagtgatcgtcaacgtttcttcggtcgccacgcgcggcgtcaatcgcgttccctactccgcagccaaaggcggcgtcaatgccctgacccagtcactggcctttgaatacgctggagccggcattcgcatcaacgcgacggcgccgggcggcaccgaagcaccgccgcggctgacgccacgcaaccgcgaatccccgacgcagcaggaagaaagttggtatcggcaggtggttgagcagactatcgacagcagtctgatgcaccgctacggcagcgtcgatgaacaagccgccgctattctgttcctcgccagcgccgaagccagttacattaacggaacggtgctgccggtcgccggcggcgatttgggataaaacaggcgcagggccgcagcgatcagcctttggttatcctgcggccctgcgcgtcgatcaccggctcgccgtcctctttgctgaaggcgccgcgctgcggatccggcagaatctccaacaccgcctccgacggacggcacaggcgcgtgccaagcggcgtcaccacgatggggcgattgatcaggatcggctgttgcaccatgaagtcgatcagttgatcgtcgctccaggcaccgtcgtccagccgcagctcggcgtaaggctcgacgtttttacgcaacaacgcgcgcggcgtcatgttcatgtcggccagcaacgcaatcaaccgttcgcggctggggggcgtttccagatacagaatcacctccggctcagcgccgctgttgcggatcagcgccaacgtattgcgcgacgtgccgcaggccgggttgtgataaattttgatgtcgctcatgtcagttgctccggttatggcaaaacggacagccgcagcgccagcgcggccagggtgacgaacagaattggcagcgtcatcaccagtcccacgcggaaataatagccccaggtaatgacgatgtttttccttgccaacacatgcagccacagcaacgtggccaggctgccgatcggggtgattttggggccgagatcgctgccgatgacgttagcgtaaatcatcgcctgcctgatgacgccttccgcgctgctgccgtcgatcgacagcgcccctaccaacaccgtcggcatgttattcatgacggaagagagaaacgcgctcaggaagccggtgccgagcgtcgccgcccacagcccctgccgcgccagcgcatccagcacgccggacagcagatcggtcaagccggcattgcgcagcccatagaccaccagatacatgcccagcgagaaaatcacgatctgccagggcgccccgcgcagcactttgccggtatcgatcgcccgcccgcgtttcgctaccgccagcagcaccagcgcgccgcaggcggcgaccaaactcaccggcacgccgagcggttccagggcgaaaaagccgatcagcaacagcgccaataccgcccaaccggctcgaaacgtcgcgcgatcgcggatcgcttcccgcggtaccggtaaacgcgtcaacgcgtagcccggcggaatatccttgcggaagaacaaatgcaacatcaccagcgtcgccgccacggcgacgaggttgaccggcaccatcaccgccgcatactccgtaaaacccaagtggaagaaatccgccgaaacgatattcaccaggttggacaccaccagcggcaggctggcggtatcggcgataaagcccgccgccatgacgaaagccagcaccgccgcaggacgaaaaccgagcgccgacagcatggcgatcacgatcggcgtgaggattaacgcggcgccgtcattggcgaacagcgccgccaccgccgcgcccaacaggagcatataggtaaacagccagcggcccttgccgttgccccagcgcgcgacgtgcaaggcggcccaggcaaaaaagccgctttcatccagcaacaggctgatgatgatgacggcgataaaggtcgcagtcgcattccagactatctgccataccacggggatgtcgccgacgtgcaccacgccgctcaataatgccaatcccgccccgatcgacgcactccagccaatacccagccccttcggttgccagatgaccaagatcaacgtcagaataaagatcgcccctgccactatcatcgctgtccttccgcccctttaagtttacatattcgatttttcatatgtgtttgcgtaaattttttaccgttacgggcaacctttcgccacgcgttgtgctaactccgtcatctgttctggccggcactgataagcctgctcaataatcgccgccgcccaggccggcatatgcggcgacaggcgataatgtatccatttaccctcgcgccgatcgagcagcagcccgctttcacgcagcatccccagatgccttgaaatcttgggttgcggcagcgccagtgcgcctgacagctcgcacacgcacagttcaccggcgtggcgcaacagcagcaccaaggtcagacgcgtctcgtcagacaggtttttaaacagcttcagcggcgtcaatgacggcatgtcacactcccgttaacctttctcttcaccacaactcgctcgtgaagataccagcttcacatgcgaaaaaacaaatataaaatgcaaaacgttgcccccctcaccgagacatatacttatctttatgccgttcttgcaggaaggaggtaccatgccgctcacattcaaacgttcggaaaggctctccatcggcaccgaaatagagttacagctggtcgatgccgagcactacgatcttacggatcgagccgatcgggtggtcagcgcggtcggcgaccgccggcgcgtcaagcatgagctcaccaaatcgatggtggagctgaacagctcggtgcaccgcgatctcgatgagctgcacaccgagctgcgcgccctgacccataccgtccggcgcagcgcgcagcgcctgggctgtgacgtctgcggcggaggccgccacctgagcaacgactggcgcaagcaggtcatcagcgacaacgcgcgctacaggcagttggccagccgttttggctatctctccaagctggcctgcgtgttcggccaacacattcacctcggcgtcaacgacggggacgaagcgatgtacctgtgccatgcgctgacgccctactttccgcaattgatcgcgctcagcgcctcgtcgccgctgtatcagggggtcgacacttgctttgccagttcccgcttcagcgcccagaactccttccccaactacggatgcctggaacacatctacagctggcatgaattcaacgcctactacgaacggttgaatgccgcaggcgtgattgaaagcgtcaaggatatttactgggatgcgcggccaaaaccggagctgggcacggtagagatccgcatctgcgatacgccgctgcgcctcacccacgccgtgctgctggtcggttactgccgcctgctggccgattttctgttgcagcaccgctcaccgatcgcgccggaatacgatgccttcaccaattacaacaagatcaacgcctatcgcagcggctttgccgccgaatacgtcgatcccgcgacgctgcgccgcagcagcctgaccgcccacatcctgcacactctcgaagcgctgagcggttttgccgagcgacgggaggatcgtgccctgctgcaggccgtcgagcgccatgtccgccagggcatcagcgattcggagcatatccgccagatgttgcacaacggcctgccgcaagctcaggtgatcaagcgcctgtgcgatgagctgttgcagcctgcaagttaagtttcggctatcgattccatacgccaaagccgctgttcattatgtgctctttcgctacaatcgtgagcactgacattcaccgtatcgaggacaccatgtacaacttctcccgctatcaggcaaaagaactggcgctggcttacatgagcggcaaaaaacacgatctgtcgccgcaggaatttttgcagcagctgaaaagcagcgagcgatcgtttgagcatctgctgaaacacggcagcgaaatgccgcgtgacgtgctggttaaaagcttctgaacagccggttgccggccattttccctctacgtcgccggtggcgagcctggcaggcccgcgcattcccggccgttcatcccacgttcctcatcctgcctcgtttcgccctcacaggcgaaaaccccataaattcgcacctagaggcgaattattgacatattcgtatccaggtgcgaatttatagtcatccctccgcaaataatggaacacgccatgccgacgccaatcagcgtaatcagcggcgatctggtcgattcccgccgatcagacaccgtcaactacctcaatgggctgcataacctgctcgatcggctgcggcgtgacgggcggctgcatcaggtggaaatctttcgcggcgatgccttccaggcgcaggccgcgccggaggacgggctgttgctggcggtgtacatacgcctcgcgctgcgggcgatgggcgccgcgcactgggatgcgcgcatcgccgtcgggctgggtagccaacggcccgacgccgccggttacggcagcgcctttatcaactccggcagcgcgctggacgccatggcaaaaaattgccggctggctctgaaaaccgacaacgatcggacaaacgccattgtcagcgatctgctgccgatgttagatcatgtaattggccgcctgtcacaggccgaagcgcgcatcgttcaggcgagaatgttcgccgacagcggcgccgccgtggcggaccagctgcaaaaagccgcctccacggtctccgccgcgctgaaacgcgcggcctatgaggaaatcatgcggtttattcacgccattaacaggatcgtctgaccatggatctgacctatgcgcctttgctggcctggctgttgctcgtccatctgctggcggattttccgctgcagccgctgagttgggtggaagataaaatccaacatcgcgcgcgttcgcgttttctgctgttgcacgcgttgctgcacggggtgctgaccgcctgggtagtggccggtttcggcctgctgcacggcggactgtcttcactgcaggtgctggccagcctgctggccatcgccgtcagccactacctgatcgatttgctgaaagtcaccgcgatgaaccgcctgagcccggcccgcagctttctgctcgatcagggattgcatctggcggtgatcgccttactgtggctggggctgacgccgaatgccggtgaactgctcgcggcgttgggacggcaactggggagttggcaaaccggcctggtgctggtggcctacagcctgatttatctgccgatgagcctgctgattgggcaactgctggcgcgctggacgccgcaaatgccgccttcggccaaggccgacaacgactcgctgctgcgcgcgggcaaacagattggctacctggaaagaacgctgatcctgaccttcgtgctgctggggcaaattccggcgatcggttttttactggcggccaaatctatcttccgtttcggcgatctgcgccaaagtgacgataagatgcgtaccgagtatgtgctgctcggcacgctgttttccttcacgctgaccatcatgctcggcctgctggtcaacaaactgctgtagcggtgcgggggcgaaaaatttcgcccccgaagtgaacgccgaggcggcttacagccactcgccgaagcggcggatatagaaacgcttcatcaactgcgcgaccacgcagtagctgaccagcgttgcggccaaccacgggaagtattcccacggcagcggctgcaggccaaccagggcgccgagcggcgagaacggaatgtagatgccgagcgccatcaccagcccggtggtcagcaacaccggcagcgccgcggtgctctgaatgaacgggatcttctgggtgcgcagcatatgcaccaccaacgtttgcgacagcagcccctcaatgaaccagccggactggaacagcgcctggtgttctacgctgttggcggcgaacacgtaccacatcagcgcataggtcgtaatatcgaagatcgacgaggtcggcccaatccacagcataaagcgcccgatgtttttggaatcccacttgcgcggcttgcgcaggaactctttgtccatcttgtcccacggcagcgacagctgggaaatgtcatacatcagattttgaatcaacaggtggatcgccagcatcggcaggaacgggatgaaggcgctggccaccagcaccgaaaacacgttgccaaagttggagctggcggtcatgttcaggtacttgatgatattgccgaaggtctcgcgccctttgatcaccccctcttccagcaccatcagattcttttccaacaggatgatgtccgccgattccttggcgatgtcggtgccggtgtcgaccgaaatgccgacgtcggcatcgcgcagcgccggcgcatcgttgatgccgtcgccgaggaagccgacggtatggccgttgctctgcaacattttcagcacccgcgatttttgcagcggcgtcagcttggtgaagaccgtgcgttgttccacttcgcgcgccaactcttcgtcatccatctgttcaatctgcagcccggagagcggctcgcccggctccagcccgacatcgcggcaaatcttgcaggtgatcaccgggttgtcgccggtcagcaccttcaccgtcacgccgttttcctgcagtgcggcgatcgcctgctgcgcgctctccttcggcggatcgaggaaagtcagcagcccttgcaccaccatgtcgcgctcgtcggccacgctcagcggttcggccgggcgctgcgcatccagctcgcgcgtcgccagcaccagcacgcggaaaccgtcttcgttatactcgcgggccagcgcctgcagcgccgcacggcgcgcgtcgtccagttccagcgttttgtcgccttcgcgcacgtgggtggcgatctcgagcatctcctctaccgcgcccttacagatcagctgctgcttgccattttcgtccgccaccacgatcgacaaacggcggcgcacgaaatcgaacggcagctcatccaccttgctgaaacggcccagggcttcgatccccggtttgccgcgcccgaaacggatcaccgcctggtccatcaggttcttcatgccgctctgatggaagctgttcagccaggccaggtgcaacacctcgttatccctggcgccagtgacgtcgatgtggtgctcgagaatgatgcgatcctgggtcagggtgccggtcttgtcggtgcagagcacgtccatggcgccgaagttctgaatggcgttcaggcgcttcaccaccaccttgcggcgtgacatggcgatcgcccctttcgccaggttggagctgacgatcatcggcagcatttccggcgtcaggccgaccgccaccgccagtgcgaacagcgccgcctcgctccagtcgcccttggtgaagccgttgatcagcaacaccaccggcaccatcaccagcatgaagcgaatcagcagccagctgacgctgttcaccccgcgatcgaacgcggtttgcgcccgcgaaccgacgatcgacttggccaacgagccgaagtaggtgcgcccgccggtcgccaccaccaccgccgtagcggtaccgctggcgacgttggtgcccatcaggcagatgttggacagctcaagcagcgcgttctcgctggacacttccccttcgctcgacttctgcgccacgttgcccatcgcatcgtatttctcgatcgggatcgcctcgccggtcaaaatcgcctggctgatgaacagatcgcgcgaggcgataagacgcacgtcggccggcaccatgtcaccggcggagagctggatgatatcccccggcaccagttcgcggatcggcacttccagcgtcagcggatgcgcgctgtagctgctgcggcgcagcaccgtggcggtagtgcgcaccatcgatttcagcgcttccgccgctttgttggtgcggtattcctgccagaaacgcagcagcccgctcagcgtgaccatggtcagaatgatgatgacgccggtgagttcagtttcttcaccgctctggagcggcagccaataatcggtaaagaaactgatcgcagccagcaccatcagcacgaagataaacgggttgttaaaggccttgatcaactgaatcaaggcatgcggcgccttgtcgtgggcgacctggttggcgccgaactgctccagccgctcatcggcatcgtcctgggtcaagccgttgcggttgcacttcaggttcgccagcgtttgggcgatgctgttggtcgcctcttgcgcaatggcgtaggtcaccgcgtctttatcacggcgacgcattctttcattaatctgagtcataacgctattctcttattttcgttctgcgcacagggagatcccgcccgataaacaggtgactctgcgcagagtggaattttttaattagcgtgactgaatagcgtgattaccctgtcagccacgcaagaatcatttcccttccggggtcatcgtccataacgcctccttaatgttccgcgttattcaaggcactcatgaataaaaccgaacatataataaagttaatcaatatttgtattattactcagaccggtaattcggacgcgacgcgccaacgcacggcactcacgcttttttccagactgacgcggcaaacaataccctcaatttctttttgcgcggccggcgtagcggtaatttccgcgcacacttccaattgccccgggctggcaatatcggcgctgcgcaaggattgcagccgcaaggcgacgccgttcagcgcctgcagaatcagggtgcgcaccagaatttcatcctgctcgccgcaggtcacctgaatgcgatagcacagttccagatcggtcgcctgctggtgcggctgcaggttgatgcgctgcgcggcctcgcgcagcaggatattggcgcacaggatcaccagcgtggcgaccaccgcatcccaatgctggcccaggccgcacaggacgccgatccccgccgaacaccacagcgtggcggcggtgttgaggccgcgaatgttcagcccttcacgcatgattacgccggcgccgaggaagccgatacccgagacgatctgcgcggccacccggccggcgctggccggatcggtggacatggagctgagaatgaagaccgccgcaccggtcgccaccagcgcattggtgcgcaggccggccatgcgttggcgccactggcgctcggcgccaatcaccgcgcccaggcacatcgccagcaataaattcaaaacgaaaggagtcatagccatgactgtccccttaattaaccgcaggagataaaatcatgtgctgtttagcacacgcgaaatcgcgctgaaaataaatcagcgaatcagcgtgtcatgcctggagggaaaaggctgtggctgcagaataccataataacgtccaactcaattcgcctgaagccacctggcatcaggaaacgttttcttattcgggtatgcacagctcagaaataactggagaggggtgctgcccgccgataacggcaagcaacaaatcagaagagaattggtcagcttgccttatttattttattacaactacaactgtccaattgggtttctccaccgaaattttggctgagtatagtgacgtcgggtaatgaagtaaaggctaatttattaaacgaaaaataaactggaatacccgcaatgatatttcgatgtcacaaatagaagatggcgacattgggcgccgacgccgccttccggccgctgcatcaggccctgtgggacaaagcgctgaccgccaacttcagcgcgcagccattcgccggcgtagcggcccgcagcctgcgcgccaaacgggccgatggccgcacgttcgacgttgcgccttagcaaggtcgccggcggtgggctacgctaggctatatttccgacgacccgcaaggagtggccgatgacgcctctgatccacactctgctcgacgaaatttggcaaagcctggggcagcgccccgcccccgccgaccggctaaccgtaagcggcaccggcgcattgccttcggcttttcccgtaaccgaattggctaccgccgcctggagcgccgccggtttggcctgcgccgagttgcttcgccgcgaggcagccgacgcgccgcaggtctgggtcgatcaacgcctggcctcgctctggttcggctggacgctgcgtccgctggggtggacgctgcctgcggcctgggacgcgctggccggcgactatgcgacgacggatggctggatacgcctgcataccaatgcgccgcaccatcggcgagcggtggagcaggtgctgggttcggcatcggataaaggcacgctggcggaacgcgtgctgggctggaaaaaaagcgagctggaggaagcggtgatcgaagccggcggctgtgcggcccaaatgcgctcggcggccgcgtggcgacaacatattcagggcaaaagcatagcgctcgaaccgctgatccacgcctcgctgcagccggaagcgccaccgccgggctgggcgctacccatcgcccggccgctgcacggcgtacgggtgctggatctgacgcgcattctcgccgggccgatcgccacgcgttttcttgccggtttgggtgccgacgtgctgcgcatcgatccctacggttgggatgagcccggcgttgaacacgaagtcatgctgggcaagcgcagcgcgcgcctcaacctgaccaatgcgcacgatcgccatacgtttgaacatctgctgagaaacaccgacgtgatcgtgcacggctaccgtgccggtgcgctggagaaattgggttatggcgcggaggaaaggcgcgcgctggcgccgggcctgatagacgtctgcctgaatgcctacggttggagcgggccgtggcgcacccggcgcggtttcgacagcctggtacagatgagctgcgggttggcggaggcgggcatggtttggcgtagcgccagtttgccggtgccgttgccggtacaggctctggatcacgccaccggctatttgatggcggcggcggtgctgaccggtatggcgcagcgcctgagccgcggcaccggctaccacgcgcggctgtcgctggcgcgtacggcgcagctgctgctggcgcatccctgttcggcagattatcggccggaaccgctggcgccggccggccccgccgacgagaacccggaaacggaattgacttactgggggggcgcgcaacgcctgcgcgccccgttaagcctgcagggtacgacgctgcaatgggcgctgccggcgaccacgctcggcacctcgcaaccggaatggctgcgccgttaaatcgccgccaactgttgctgcagccactgcagcaagcgggtgaccgccggcgtcagcccggcggtctgcggccacaccagataaacgtcgtcatcgctcaggcgacagggcgcggccaacgccaccagtctcccggcgtcgagggcatcctgcaccagcagctttttcgccagcgcgatgccaaacccttgctccgccgcgcgaatcaacaatccggcatcgttgaacaacgcctgttgccgcccgcacagcgagcgcccttgcgcattgaaccaatcgcgccagggactgacgtcgtgctcgagcaacggaatatcgccaccgttctcgaacgccgccccccattctcgcgccatatccggcgaagcgaccggcagcacgtcacccgacgcgatgcgctgcgcctgcagccccgcccattgaccgctgccgatgcggatcgccacatcgaaccctcgctgcgacagatcctgcagcgccagcgacgcatcgatatccagcgcaatatcggcgcaggcctcatgaaaagcaggcagacgcggcaacagccaataatgggcaaaagacggcaacacgctgatgcgcagcgtctggcttgtcgccgcacgtcgggcgcgggcgacgccctgctgcagcgcctgcagcgccggttccaccgccgccagcatctctttcccggccgcattcaggcgcacgccgcgcccgcgccgttcaaacagcggatagccgaccgcctgctccagcaactgaatttgctggctgaccgcaccgtgcgtcaaatgcacctgctgcgccgtggcgcgcaaattttccaacctggcggcgatcgcaaaggtcggcaagacatgcaggggaatgcgttcattcatcattggttaaccaggctatccaaaaaggttatttttcatcgattttgaccggcaggcaaatgttctatgtttacaccatcatccctgacgctttcggagccgccatgcacccacgtttacaacaagacctcgcacagtttccgcagatcctcgaccacactcgccagttggcggaagattttctgaccgggctgcagcaacgctcggtctgcccaccgcgcgatcaacagcagctgcatccgggagacgatcggctggcggaaaacggcgaaggcgccctggcggcgctggataacttttggcaacgctatcaggccggcatttccgccagcgctggcccgcgttatttcggcttcgtcaccggcggcggcaccccggcggcggtcgcagcggactggctggttagcgtgacagaccaaaatagcttgctcagccatgataccatcgcagccacgatcgagctggcggccgtgacgcagttgaaatccctgctgggcctgccggaaacgttcagcggcagcctggtcagcggcgcgaccatggccaatttcaccgggctggccattggccggcagtggctgggacaacagcacggcgtggatatcgcccaacagggcctggcggcgctgggttccatccgggtattgtcggccaatccacattccagcagcgtgaaggcgctcagcatgctcggtatcggccgcgaggcgctgacgaccgtcgccagcctgccggactcggaagccatggatatggaagcactggaacggcagctcgccgccggcgccggccagccaacgttggtgctggccagcgccggtacggtcaacaccgtcgcgttcgacgatctgccgcgtctgctgacgttgcgggagcgttatccgttttggctgcatgtcgatgcggcatttggcggcgtggcggcatgctcaccgctatacgctccaaggcttgagggttggcagcatgccgattccatcactgtcgacgcacacaagtggctgaacgtgccttatgacagcgcgatccaatttacccgccatttggatctgcaaatgcaggtatttcagaaccattcggcctatctggaagcaccgacattgcggccagacaactatctgcatctgacgccggagaattcgcgccgcttccgcgccctgccgctctggctgacgctgaaagcctatggccgcagcggcatacgggatatcgtcgagcgcaacgtccgattggcgcaggcgctgggggcggcgctggcagccgatgacggtttccagctgctggcgccggtgaatttgaacgtggtctgcttcgcactcagccatccacagggcgacagcgaggcggcgcgcgatcgttttctcgagcgcctgagccggcacggcgtggtgtgctgcacccctacgcgttataacggtcagccggggatccgcgccgcactggtcaactggatgacggaggaacaggacatccggctggcgttggactcgttgcgccattgcctggcggaaacggcctaacgcgcgcggcgtattacccgagttggaaggcctgcaaacgccgttcttgccgcccgtcatcgccgatattatccggcgacagccaggcggcaaacgccgcgcgccgcgccggccattccccgtcgacgatcgacagccagtcggtgtcgcgcgtgcgtcctttgacgacgacggcctggcggaaggtgccttcatagcggaaacccaagcgctcggcggcctggcgtgaaggaagattgaggctatcgcatttccattcgcagcgccggtagccaagatcgtcgaacagatgccgcagcatcaggaaaatcgcctcgctgcccagcgcgctgcgcttcatcagcggcgaccagttgatggtgcccagttcggccacgccgttggcaggatcgatgcgcaaaaaagcgcagcttcccaccgcacgcccgtttgactgatcgatcactaccatcgtgtttctgtcagcgctggacgcctgagcctgaagataacgctggaaatctgcgcgcgactgcggccgctcccaaaacagataagtccagtcgcgatcgtcctcggcggattgataagcctgataaagcgcctccccccagcgctcgaggttaagcggttcgaggcggcaaaaccgcccttgcagtggcgagtgcccgggcatgcctgccggctgccaatgagggagggcttcgcctatcggctgcccatactgattccgtctcaccgcgacatcctgtttttgaaaggtggagaggcaagttaaaaccaacgcgggccagagacaactccgacctgccattcctcccctgcggatcgggcagcaggatgatagtttagagaaatcactcaatcaccgttaaacattcacgaaaattatttcatttaaaataaatatccagataactcattgtaaaacggtgatttatagcaacaaataagctacacattccggccataatgttaactttcgtttgccgttatgataaaaaaagaagtgctaatcattagcatggaaagcatgaaatcaacacaacttaatgatttttaaacaaaaaaataaaataacctcagagagggtattttttaatcactcaaaaaatgcgctgaaagacttcaaaaaaacgacacatgaattttttttaagacttttcctagcaaactaaaattttgtttcgtgacatgatgaacagattcgcggcaagcaatgccggcaggcgcgggcgccaagcgcagatcaggctcaacatgccgaagctggacgagcagcagatcgctctgacttaagccaaacttatagattcatgcaattaataagtttagtatgaaaatatcattgagtgacgccgtgtttattgatagaacactcgctacactgaattattgctccattttgcctttcggctttttaggcttttttcatattaccgcagtaaaacggatttaagtgggggtgcgatatgccaacgattatcatggattcatgcagctataccagattggggttaaccgactatctgacttcgcatggcgtgaagaagcgccatattaatgccatcgaggacattgacagcctgcatgaaaaatgcagcaagttgaatccgagcctggtgtttattaacgaggactgcttcatccacgaagcaaacgccaccgagcgaataaaacgggtgatttcactgcacccggatacgttattcttcatcttcatggccattaccaacgtacatttcgacgattatttatatgttcgcaagaacgtcatcatatcgtcaaaatccatcaaaccagagactatgaatcagctacttagccactatctcgagagaacgtccctccgtacggagaaatcctctctggatcaaacgccggtaacgctgagccagactgaatcaaacatgttacgcatgtggatgtccggtcaaggcaccatccagatatcagaccagatgcaaataaaggccaaaacggtctcttcccacaagggaaacatcaagcggaaaataaaaacgcacaacaagcagatcatttatcacgttgttcgtttgaccgatacattgaccagtggaatattcgtcaatagccgctgaaccacagagaacgcccccgctctgttttaccagccgttaaatacccgatgataatgtcatctggatagcagccgctggaaccacaaaaaaatacctgttgcgttatcccccgctagcgcaacgggtatttttttgccgtcgataaaaaaaatcttaccgcaatgaaataatctcaaaatggacaatttcattagcaaattaatgagattagcctaagttactgcccgtgctcgcgacagggctccacaaacgtgccgtcacggctgtcgatctcattaaaaaaccatacgcccgccgggtagtcgtcaagagaaaccaggtacatggtgccttcgttgaacacttctacggccagaatgacgccttcacgccgcgggccgccgtctgtttttaccgtcactctatcgttaacttgcatacccttctcccttatttacgattgccgtcagtgtattacaaaaccggaggcgatggacaccgctccagccctgccggcctctgctatcagcgtagcagccgcctggattttcactttcttaacggtttggccgcagaatcttaagccggtctcgcgtagcctgtcttcaggcgtttcccccccagagaagcgctcgcaaatgaagaagtaacaaggaacttttgcccgcagacttgcgggcttttttttgcgcgctgccaaattgcaggcataaaaaaacccgccgcagcgggttcttttcaatcagcgggaaacgccaattagatagcggtaacgttagccgcagatggacctttcgcaccgttctcgatagagaactgtacgttctggccttcagccagggtcttgaagccttgatcctggatagcagagaagtgtacgaatacgtctttgctgccgtctgctggggtgatgaaaccaaaacctttagcttcgttgaaccacttcacttgacctttgatcatgttagacatgtctaatttccttcaataataaatgtaagccgccatgggcgaggtagccggtcatcagttacttatggaggcactggaaaggaaattcgtcagagaagggctatccgggataacgctttaaatttgaactactttactcaaaatgtcgtgcataaataggtctgtaccacaggccgacatcattaactcatgagcgagcggcaatagcaacctttttcgccgcgatgggacgctaatctcggctaaacgcacaggatttgaccctgtctgccgatagggccgccgcctggctcgcccgtaacgcccaaggcaaatgatagtaattctcgttctgctgttttatagttgcctgacgaaatcattcagggagattcaccatgccgagatggcttacattaccggctgtcagtgccgccgccctgctggcctttgccgcttacagcgctccgcagagtgcactggagctcaattatcaagcccccgaccccagcatgattcccgcgcccaagccgcctgccccctcagggccggcccccaaaacgggaaaaccgccgattgcctggacagaggcgagagataaaagcggttttcgcgtcgatattgagtgcgatcatcctggctgcagcaaaccgcgcgccaaaccttatcccgcgtatgaaggcccggtgaagaaaaccgatcgccgccgccagtctgatccctattccaccaataaggatcccgattacaacattcagttggggtatgagtggtagtggcgctttcggagtaatgcctatatcagcctcctttgccgctgcatagaatatgcctcagttcaccactcctcctggtgttgaacacaacaagctgtgttgcaaatctttatgcgcctccctataggcgctttttttttgcctatccctcaaagcgtcttccgattacagattgctctcattgccccacaaagtgatgaatgtcacaaatacgcctccttgccattcttattcggaggtaacgttcatggccacaggatcccttgccctcctggccgtcttggccggcattgcgggcttcgccctctacaagcatttaaaatctcagaaaaaaagcacactcgtccgcccgcacgatcggtaaccgacaacgcgctttcaccgcgaaggcccggcacatcgcgcgccgcgccttcgcgggctgtcatgctttcatcacaaaattgtcacattatggccatatgatgattcgcgtttatccgctctggcttaacaccaaggatttcgcccatgaccataattaaagctgcaaaccatcaggaagcagaaaaactcatccgcgccggcaccgccaagaaaatcgaactggcttacgatatcggcagcgacgacttcttccagcttgccagcctgtggtgcgataaaggcgccaaaatctccaaaggaaaagaacacttcatcgtctcgttaaaagggttccgcatcccgcctaacgattaatgccctgccgcccatcgcggcggcttcgcctcttcctcgcaaaaccgctctattcaaccacgcgcgcctcattcgatttcgctaagctaacagcagactttattgcggacgtttcgcctgataaccacgtccgccacgatgaggagagtaaccatgtcaacaaatgcagcgctgcccggcacgatgaaagcgattgaaatcagcgaaccgggcgctcccgacgttctggtcgttaccgaacgcccggtgcccgctccgcaagcgggcgaactgctggtgaaaatcgccgccgccggcgttaaccgccccgacgtgctgcagcgccaggggaactatgcgccgccgccaggcgcctcggatatccccggcctggaaattgccggcgaagtggtggccatcggtgaaggcgtgacccacttcgcgctcggcgatcgggtttgcgcccttatcgccggcggtggctatgcggaatactgcaccgtgcatgaaagcaatgcgttgccggtgccggcggggctgagcctgaccgaggccgccgcgctgccggaaaccttctttaccgtctgggtcaacgtgttccagcgcggtcatctcaaagccggcgaaaccgtgttgatccatggcggcacctccggtatcggcacggtcgccaccatgctggcgaaggccttctgcgcccaggtgatcaccaccgtcggctccgaagagaaacgtcaggccagcctggcgctgggcgccgacgtggcgattaattaccgcagcgaagactttgtcgcacgcaccaaagacgccaccaacggtaaaggcgccgacgtcatcgtcgacctgatcgccggcgattatgtcgccaaaaactatcaggccgcagcgatggaaggccgcatcgtgcaaatcggcacgcaaaacggcgtggtgaaagagctcaatctgatgccgctgctgttgaaacgtctgacccataccgggtcgacgctacgctcgcgcagcgtggcggacaaagcgcagattgccgccgatctgcgcgaaaaggtttggccgctgctggagcgtggcgtgctgaaaccgcaaatttttaaaaccttcccgcttgagcaagccgccgccgcgcatacgctgatggagtccagcgagcacatcggcaagatcatgctgacgttctgagcccattccccgcggccggtgctgcggggaaaccaatgccacgttcagggaatgatgccgcggcggcggaactcatcgaacagtgagaaaaacatgacttcggtttcgacaaactggtggaaaccgaagcgccgcgccttgctgccatccgcgaacatgtcatagtcccaggaaaagacgaaatcggcgaaacgccagccggccaccgcgcgatagtccggttcggccaattggtgccgctgcgccagctcccgccacagcgacgctttgtccgtcatcatgatctccagcgacatcggcagcggcggcgcgcattccagcccaaagtaagcggcgattttcggccacatctcgctccagcgaaacagatcgccgttgttgatattaaacgcctgattggccgccgcaggttcggtcgccgcccacagcgtggcgcgcgccaacagcccggcgtcggtcatttccagcaggctgtggtaagcgcccggtttacccgggaagcgcaacggcagcccgagcgctttgctgatcgacgcgtaaaccgcgatgcttaacgccagattcatcgggttgccgagggagaagccccccaccacgcttggacggatggcgctccaacgccagcgtttgccggcctgccgctgcgccagatactgctgctgcgccacgttaaactccggcggcatatgcccggcatcgctttcgcgcgccggcgttttaaacggccccaaatgcgcgccatacaccttataaccctgcatcaaactgatgtgctccaacgccggcgcgatcggctccagtccttcgacaacgtgttgcaacatctgcaggttcggcgccaccagccccgcccagtccggcgcatcctgataggcggcatagaaaacgtgactaatcgcgctcagcggccgcagcgcgtcgcgcgtcgccgccgcatccagcagatcaacctgaaggtggcgcacccccggcgccgattgtcccccccggcgcgagacgcccaccacttgccagccctgaccggtcagctcctcaatcaatcggcgcccaatcacgccattggcgccgatcaccaatgcctgtcgctttgtatccatcttgccactcctcaggttgtcgataccctgagtgtcattgattagtaatacttgcggtagaagagaccttccactaacacttataagaaaaatctataggcaagatcgacatggataagctgaacgcaatgaaaacctttatgcgggtggcggagctgggcagcctctcggccgccgctcgcgatctgcgtttgacgcagccggcggtcagtcagcaaatcgccggtctggagcagcaactgggggcacaactgctgtttcgcagcacccgggcggtcaccctgaccgatgccggcagcagttattatcagcgcctcaaaccgattctggcggcggtcgatgaagcggaagaagcgctgcacggccagcaccaccagttacagggcaatctgcgcattcatgccccgaccgggttcgggcagttgcacgtcacgccgctggccatcgctttccagcaacgtcatccgaacctcgccatcgagctgctgctggacgatcgtcgcgccgacgtgatcggcgaaggcatcgacatggcgctgcgtttcggtgaactgcatgcgcccggcatggtggctaaacgtttgggcgagctgcaacgcctgctggtggcgtcaccggcctacctggccaagtatggcgctccacgttcgccggcggagctggctaaacatgcgcacattcgttacagcggtttgaacgacggcgatacgctcactctgttcgggccgcacggccccgagatggtcgctctgcggcccacgttccgcgccaacaatacgctatcgctgctggccgccattgaggctggagccggtatcggcggcgcccaacggcctttaatcgcccagcagctggcgacgggggcgctggtgcccgttttgccggaataccgctacccgcccatggcgctgcacgcggtctatcccgctttacgttttattccggagaaagtgcgcccctgggtggcacatctgcagcaggcgttgacggcgatcgagggaattagcggagtgaatgctcccggccagacgccgggagcctaatcattatttgaacagtttaccgaccatatcgcccagctcgttgctgtcttgctgcacttcaccgtttggtgaggcggcatccgcgaccgttggcaagaactgtgcaatggtgctggacgcctgtgcaggatcgatgcccagcttttcagccagttggttgatggcgtcgctacccaacgcctgctgcacatggtcgccggtaatcggctgattttcgccattgccgagccaggaaccgacgatatcgccgaactgcccctgacggaacttgtccaaaatggcctgcaggccgccttgttgctcgacccactgcataatggcgatgtagtcgatacctttaccaccgttggcgccgccgcccagaatgttacccaatacgctatcgaacagacccatgatattcccctttcagcgggtacggcccgcgccgcaccgccggattgatttcacgaaaaagggccgccgcggcgaccctgttgagcaacggctgcttagcctttgatcttcctgtagacaaaaagcaccaccagggcaccgatgaccgccaccacaaagctgcccaggttaaaaccgtcaacgcggcccataccgaagaaggtgctgatatagccgccgacgacggcgcccacgatccccaatataacggtcacaataaagccgccgccgtctttgcccggcataatccacttggccaggataccggcgattaaaccaaaaatgatccaggaaatgatgcccatctttactctccctattaccttttgcctaacagaaatcctattaccaggcccacgacggcgccggcgcctatccccgcccaagggttatccttgaggcaggcacatgattgctcgagcgctgcttttacaccgctgctcacttcgcaggcggtggttttcacgtagtcgctcggttgctcaacaccgtttagatcgtcattttcatatgacatgtcaaatccttacagaccaaccctctgagaatttcgtcacatgtttcgcgccaggcgccgtccgctccgcgatcttgctctgggcaatctgcccgctgccgctcaatgcggaggcttccggcggcaaacgcacaacttcacactatgactatagtaaaaaatcagcggtttacctatttccgtccgtctgaatttcaccatacaaaaaacgatctgatttcatcccgctgtcatcttgcaaggctaaactttaaacatatcctccgggaggaaacgccgatgttcaatgcaccttttgtcctgatcctcgcgctactgtacgcactggccgccgcttgggacggttccgtagcgttactgtttcattaaggttacatagccgttgtcacttttgcgatgcgcttaattgtgtctttatttttcaatttcgccagccgattgaaatagcggaaaacatcccctcctccctcggtaaaaatcctatttcgcttcgtttttcgcctgcgtttaaataaagcgtaaaaaaagcattaatggaaaattctgtttagcacaaaatattctatcatcttcctcatgacaatttgggttaaggtcccattggcaaagaaaaggaatgacaggaaaaatgctttataaccaacactttgagcgcgaattcttgcgccctcgttattggttgttgtggataggactgggaatactctatctcttggtattactgccctacccgctcatttatcggctcggacacggccttggcagaatagccatgcgcctaatgaaacgccgggtaaaaatagcgcgccgcaatttagaactctgtttccccgcaatgcccgccgccgagcgcgaggcgctgatcgtcaaaaattttgagtccgtcggcatgggcctgttcgaagtcggcatggcctggttctggcccgactggcgcatcgcccgctggttcaaggtgagcggcatggaaaacatgcggctggcgcgtcaggacggcaaaggcgttctgctgatcggtctgcatttcctgacgctggaactgggcgcacgcattttcggcatgcaaaaccccggcatcggtgtgcatcgcccgcacaacaacaagctgatggaatgggtacagacccgcggccggctgcgctcgaataaattcatgatcgatcgtaaagatatcaaaggcatgatccgcaacctgaaacagggcgaaatcctgtggtacgcgccggatcacgattatgggccgcaaagtagcgtattcacaccgttcttcgccgtggaaaatgccgccacgaccaccggcacctttatcctggcgcgcatggggcggccgtcgatcgtgcctttcgtgccgcgccgcctgccaaatgctcagggctatgagctgatcgtgcagccgccgttgacggacttcccgctggatgatgaaacgcgcgcggcggccaagatgaaccgcgtggtggaagaacaagtgctgctggcccccgaccaatacatgtggctgcaccgccgctttaaaacccgcccacccggcgaaccgtcgctgtattgacccccacgcgcctttgcccgtcacaccgccggcgaaggcgtgctcaccttgcacaagcattctgcgccaggggaactacactagtaagtcaccgacggcaattattgccgccagcaatcatttcgtccgcccgagagccggtcgttgcctgtcgggccataatcgaggtcaatgtcatgctggtacaaccctatctgtttttcagcggtaactgtgagcaagcgattaacttctacgtacagcagttgaatgccaaagttgaaatggtcatgcgctttaaagacatgcccgaagaagcccggcaaggcggaccgcaggacgtcaatccggaagcgatcatgcatgcgcgcctgctgatcggcgaaggcgtgctgatggcctccgacggctgtccgcaggatgacagcggcggtgcttctcacaaaggtttctcgctgtcgctgaaccccagcgatgcggaacaaggacgcaaactgttcgacaatctggcacagggcggccaggtgacgatgccttaccaagccaccttctgggccaaaggttttggcatgctgaccgacaaattcggcgtcaactggatgatcaacgtcgaataaccccgcatggcgccgctagccatagcggtgccagtcatacgccgccttggcgaacagcacgaacagcagcgccaacagcaccaatcccaaccgccaatagggcgaccggcggcggcgccaggcgaagtacatcatcaccgccagcgttcccagcgtaagggggtaatacaccgccagcgtcagtaaagcgataatgatgtaatcagacatggctctttcactccgaggtgttcacaccgccgctgatgcgggcagcgatcgacctttcgccttatcgcctcgttaaaggctagaggtctggcgcatttatgcataaaatataagattgctcttaactcaaactgaatagtaatcaaacaacaagggtgacatgactcagcagcaacccatacaggatgccgtgccggcgcgcagcgttaaaagctccccattattatttcaggccggcgtgtttgtcatcatcgttgccgccacgctgatcctctttaacagctggcaaatctggaacgcacaccagcgcgatctgcgcagcgccgagcatgaatccgccaacctcgcccgctcgctggcacagcatgccgacgatactttcatgcaggtggacggcaatctgctcgatctgaccgaacgtctccagaacgacggactggggccatcgcaattgacccggctgcagcgggtgatgcaaacccaggtcggcaacctgccgcagctgcatgggctgtttctctacgatgcgcgcggccgctggctggcgacctcctcgggcaagttcatcaagaacgccaacaacgccgatcgcgagtacttcatataccatcaaaaccgcgacgacggcggcctgtacatcggcaaggtgatccgcagccgcaccaccggcgatctgatcattcccgtttcgcggcgtttcaacaacccggacggcagctttggcggcgtggtgctggcgacgctgtacatcgattatttccgccagttttacgatagcttcgccctcaacaccgacgcctcactgaacctgctgctggcggacggcaccatcctttaccgccgcccttactcggcggcgtcgatcggtaaaaacatcgccaagggtgtgctgttcagcgaaattttgccgcattcggaattcggtaacgccaccatcacctcgctgtacgacaaagtggagcgcatctacggctattcgcgggtcaaccgctttccgctggtgatcgccgccgggctgtcgaaacgcgacgcgttggcggactggcgcaccgacgccggcctgttcgccgtcggcggcctctcgctgctgatgatcctgttggcgatgggcatggtgctgctgcggcaaatcaagcacagcatgcaaaccgaagccgagctgatgcgcacccgcgatcagctgaccagcatcaaccagatgctcgaagagttggcgctgctggacggcctgaccgggctggccaaccgccgccagtttgatatcgcgctgaagaacgagctggcacgggcttcgcgcaactaccgcagcgtggcgctgctgatgctggatatcgactatttcaaacagtacaacgacagctatggccacgtcgccggtgaccaatgcctgcagcagatcggccaaacgctcaaagggttggcgtgccgcagcaacgacgttctggcgcgttacggtggcgaagagatgggaattatcctgccggataccgacgtccagggcgcactgattttcgccgaacgcgtcatcaacgcggtgcgcgatctgaaaattccgcatcagggtaatccgcacggcatcgtcaccatcagcatcggtatctgcgccaaagtaccgcatatgtataacgatacgccgatcagctttatcaatgaggcggacagtgcgttgtatcaggccaagaaaaaaggcaaaaattgcatttacggcgcttaatcatcaatcgggccaccaaattttggcggcccgatttattaccaaccaaaatgaaataattcctctccgcaacattattttcccgggttaccctgcgctctgaataaaataacgccaataataagcataatatttatttccattaaaattcaacaagataaaaaatcgcccttccacagacaattcgtgccatttttgattattcgtgcctacgcgcagccccgtttagccctcgtttacttttcattggtattgccggtgatatccttatcaggactattctctatatcaggaagccatcgcacgcttcggcgcactgcgccctgctgatacatccataatagaacccacaaatttcacgttgcaattgagcggcctgttgacgccgctccagccagccactgcgcaagccagtgcagccaatcacgcggcaacctgaaagacgggaataaagcgatatagatttgcgaggagatctcatgcctactggcgatattatgcgtgaacaggccgtcctgacgctgccgttgcgacaatgggcggcagcggaagcatccagcgcggtcagcgaactggaacagggcaaggtactgtttctgcccgaactggccttccccctgtctgaacaggaaatgccgctgctggatccgacgttggtcgatccgaagcgcaaaaacatcagctatcagccgctgtccggcaaactgagcggcgtcgccgttgcggaacgccggcaacaggttcagcaactgctggagcgctattatcaatcttgccgccagctgatcgccgggctgttgcccgagtatcaggaggcgctgcaccacccgaccggcagcctgcgtttgcacccggtttccgcctggcgggcgaccagttcctggcgcaaagacgacagccgcctgcacgttgacgctttcccgtcgcgcccgaactacggcgaacgcattctgcgcattttcaccaacatcaacccgcacggcgagcatcgccaatggcgcgtcggcgagccgttccctgagctggcggcacgctttatgccgcgcctcgcacgctactccgccctcagcagctggctgcagcatcaggtgcgcatcaccaagacccgccgcagccattatgaccacctgatgctgcagttgcatgacgccatgaaggccgacggcgattatcagcaacggggtccgcagctggcgctggaattcccaccgggcagcagctggatttgcttctcggatcaaacgccgcacgccgcaatgggcggccagtttatgctggaacagaccttcctgttgccggtgaacaagatgcaggatccgcagcgttcgccgctgaaagtgctggaacagctgcgcgggcagccgctgatctgaatggctcgccgccgccgggatgccggcggcggcgaaacgcgcattatgcctcgaagtccccttgctggcgcgccaccagcgtcagaatgctgtagagcgccaccggttgctgttcctgattcaacacctgaacatcccacaccaccacgccgtgcggccgatcttcggcggttttttgcggcttgcggattttctttttgcaggtcagccgcacctgaatggtgtcgccgatcttcactggttcgataaagcgcagattctccatgccatagttggcgatcaccggcccgacggcggcgtcgacaaacagcccggccgcagcggacaccacaaagtaaccgtgcgccacccgctcgccgaacagcgaatcggcggcgccgatcttgtccatgtgcgcgtaaaaatggtcgccgctcaggcaggcgaagttgacgatatccgcttcggtcacggtgcggcgcgcggtcaacaggctgtcgcccagctgcagctgctcgaagtatttgcggaacgggtgcaccggatgttcggcgaccggcgcaccgcgcacccattcgccgccgatggccgccagcatcgccgggctgccctggatcgccgtgcgctgcatatagtgcttcaccgcgcgcagtccacccagctcttcaccgccgccggcgcgccccgggccgccgtgcaccagcatcggcaacggcgagccgtggccggtggattccgccgccgcctgctcatccaaaatcagcatacgtccgtgagcgcaggccgccgcgcggataaagcgcttggccactgccggatcggcggtcaccagcgatcccgccaggctgccctgccccagcaacgccaacgcgatcgcctgctcggtatccgcatacggcatcagcgtcgccaccgggccgaaggcctcagtgccgtgcaccgcctgatgggtgaacggatcggcgcaatacagcagggtcggcggataaaacgccccaccgcgcgcgccgtcgcccatcacttccagcttatccaacgacgcgccgcacagcggttcgcagccgttgcgcagcaggaactccaccttgctttgcacatcatcacgctgctcgtggctgaccagcgcccccatgcgcacctgctccagctgcgggtcgcccaccgtcacccccgccagacgctgcaacaaggcctgacgcaccgccgccacctgcgccgccggcacgatgatgcggcggatcgcggtgcacttctgccccgccttggcggtcatttcacggcacacctctttgataaacagcgcaaattccggcatctccggcgtcacgtcttccgccagcacgcagcagttgagcgaatccgcctccattgtgaacgcgatcgatttttccaacaggcgcggatgcgcccgcagccgctggccggtctgcgccgaaccggtgaacgttaccgcatcctgataatccaggtgcgcaaacatgtcgccgacgccgccgcataccaactgcagcgcgccttccggcaccagcccgctgtcgacgatcagcctgaccatcgcctgcgtcagctgcgcggtggcggtggccggcttgatgatggccggcatgcccgccagccaggtcggcgccagtttttccagcatgccccagcaagggaagttgaaggcgttgatatgcagcgccacgccggggcgcgaggtcaatacgtggcgggcggcgaactgcgcctgcttcgacagcgggatcagctcatcttccggccacagcgtatcgtccggcagatcgcggccggccatgccggcataggcgaacagcgtggcgatgccgccttcgatatcgacccagccgtcgctgcgcgtcgccccggtttgataggaaatctgatacagcgcctctttatgcgccagcaggtgtttcgccaccgctttcagcatctgggcgcgctgctggaatgtcatgtgcgccagcgccgggccgccgtggctgcgggcatagctcaggctggccgctaacggcaggccgtcggagcaaacctggtacagcgcttcgccggttacggcgtgacggatctcgcgcgcctctccctgcccgtacacccaggcgccagaaagataactgtgtaactgctgcatgtgccctccggaattcataaattttcaccatacagcttaattacgtatcacataaatgccagtcgacgccaaactgaattttaacaaaaacagaacaagaagcgctttcaagccgtttaccctggcattaatacggagtcactttttatatttataaaataaaatcaaatgattaacaaaaacatttgtgagtgcgctcgcaaaaccacataaatctcgtttgatctttttgttatcaatttgtagccttatggttagttaaagtgattcacatttttatatttaatgtgaaaaatacgaatcaccaagaggcaagcatgacaactgacgcacagtatcagcagcatttcgacgacaagatcgcggcggatatcgccattgaggctaaagactggatgccggacgcctatcgtcagaacctgattcggcagatcggccaacacgcccactcggaagtcatcggcatgctgccggaagccaactggctgacgcgtgcccccacgctgcgccgcaaggcggtgctgctggccaaagtgcaggatgaggccggccacggtctgtacctctacagcgccgccgagaccctcggctgttcgcgccaggacatctaccaaaagatgctcgacggcaagatgaaatactcctctatcttcaattaccccacgctcaactgggcggatatcggcgtgatcggctggctggtcgacggcgccgccatcgtcaaccaggtggcgctgtgccgcgcgtcctacggcccctatgcgcgggcgatggtgaagatctgcaaagaggagagcttccaccagcgccagggctacgaggcggtgatggcgatggccaacggcagcgacacgcagcgcgccatgctgcaggacgccattgatcgcttctggtggccggtgctgatgatgttcggcccgagcgacgccgactccccccacagcgcccagagcatggcgtggaaaatcaaacgccacagcaacgatgagctgcggcagaagttcgtcgacaacaccgtaccgcagctggaagcgctgggcatgacggcgccggatccggatctgcactgggatgccgctgccggccactatcgcttcggcgagatcgactggagcgaactgcatgaggtgatcaaaggacgcggccagtgcaaccacgaacgcctgcaggccaagcgccgcgcctgggaagacggcgcctgggtgcgcgacggcgccatggcccacgccgcgaaaaacgccgcctccgccgcatagccaacataaggaaccgagatcatgagccacgttgaatggccgctgtatgaagtgtttatccgcagcaaacaagggttggcgcatcgccacgtcggcagcctgcacgccgccgacgaccaaatggcgctggaaaacgcccgcgacgcctacacgcgccgtaatgaaggctgctcgatttgggtggtgcagtcgcgccatctgatcgcctcgcagccggaagatcgcggcgcgttcttcgatccttccgaagacaagatctaccgtcatccgacgttttacaccattcccgacggcatcaagaacatgtagaggcgaccatgacggttaacgatccgcgcatcagctatttgcttcgccagggcgacacgcctctgatcctcgcccagcgcctgtgcgcctggtgcggccacgcgcccgagctggagatcgatctggcgttggccaacatcgggctcgatctgctcggccaggcgcgcaacttcctgggctacgccgccgaactggccgggccgccctgcagcgaagacagcctggccttcgggcgcgacgaacgccagtttcataacctgctgctggcggaacagccgaacggcggtttcaacgacacgttggtgcgccagttcctgctcgacgtctaccacgtgcagctgcaccaggcgttgagccgcagcggcgatgcgcagatcgccgccatcgctgccaagtcgttgaaggaggccgattaccacctgcgcttcagccgcggctggatgatccgcctcggcgacggcaacgacatcagccaccgcaagatccagcagtcgctggataacctgtggcgcttcaccgccgagctgttccacgccgacgcgctggagcttgagctggcggaacagggcatcgccgtcgatccgcgcgagctgcaggctccctggcaagcgcaggtggaagagacactgcgccaggcgacattgacgctgcccgccgagcaggcgttccgtcacggcggcaaacaaggccgacacagtgaacacctcggcccgctgctggcggagatgcagttcctgcaacgcgcctatccaaacggccaatggtaggaggccgcgatgaacgtcactcgtttgcaacccgctgaaatcccgcagatttggcactgtctgcaacagatcagcgatcccgagctgccggtgctgtcgatcaccgatttgggcatggtgcgcgacgtggcgcgcgacggcaacggctggcgcgtgaccttcacccccacctactccggctgcccggccaccgaatttctgctcaacgccatcgagcagcggctgacggccgccggcttcagcccggtgcaggtggacattcgcctcagcccggcctggaccaccgattggatgaacgccgacgcccgcgagcggctgcggcaatacggcgtagcgcccccgcagggccacacctgcgatcggccgcacgcccacggcccggtcgcctgcccgcgctgcggcagcacccacagcgagaagatcagcgagttcggctccaccgcctgtaaagcgctgtaccgctgctgcgactgccgggaaccgttcgactacttcaaatgcatataggagcgctgacaccatgacggtctttcatcgcctgaacgtcgccgccatcgagcgcgaaacgccggacgccgtagccatcaccctgcgggtacccgaagagctgcaaaaccaataccgctacacccccggccagcacctgacgctcaaggcgctagtcaacggcgaagagctgcggcgttgctattccatctgcagttcgccgcaggaaggcctgctgcagatcggcgtaaaagcgattgatcagggccgtttctccggctttgtcaaccgcatgctgaaagtcggcgatgcgctggaagtgatggtgccgcaggggcgcttcggctatcagccgcaggcggagcgccgcggcaactatctggcgatcgccgccggctccggcatcacgccgatgctgtcgatcatcaaggcgacgctgcagctcgaaccgggcagcagcttcaccctgatctacggcaaccgcaacagccgttcaatgatgttcaaagaggcgctgtcggatctgaaaaaccgctatccgcagcgttttcagccgctgtacctattcagccaggagagcctcgacagcccgctgctcagcggccgcatcgaccgtgaacgcctggcggcgatcggcggcgcgctgctggatttccgcgactatgaccacgccttcatctgcgggccggaatcgatgatggacgacgcgcagaccgtgctggaacaggccggcgtaccggccaaccacatccacagcgaacgtttcaacaccagcggcctggtcgcccgcccgcgccacagcggcgatcgcaatgccacccgggtggcgatcctgctcgacggccgccgattggatatcgaggtcggcgaacaggacgacagcattctcgatgccgcgctgcgccagggcgccgatctgccctacgcctgcaaaggcggcgtgtgcgccacctgcaaatgccggctgaaggccggccaggtggagatgggcgtcaactacagcctggagccggatcagctggcggcgggctacgtattgagctgccagtcgtggccgaaaggcgacggcgtggtgttggacttcgacgtctaggagccgcgatggataccccctttattttgcatcagcagcaacaccgcgtggtcacgctgacgctgcatcgcccggaggcgcgcaacgccctgagcacgccgtgcctggaacagctggttacccggctggagcaggctgacgccgacagcggcgtgggcgccgtggtgatcgccggcgcggcgcgcttcttcgccgccggggccgatctgcgcgaactgcaacaacaggatctgccggccgcgctggcggacagccgtccgcagctgtggcagcggctggcgcagttcagcaagccgctgctggcggcggtgaacggctatgccctgggcgccggctgcgagttggcgctggcctgcgacatcgttatcggcggcgaaagcgcccgcttcggcctgccggagatcaccctcggcctgatgccgggggccggaggcacccagcgcctgatccgctgcgtcggcaagtcgcgcgccagccagatggtgctgaccggcgaagccatcgacgcccgcaccgcgctgcactctggccttatcagcgaagtgtgcgtcgatgccctgacgctggagcgcacgcagcagattgccgatcgcatcagccgtcaggcgccgctggcgctgcgcgccgccaaacaggcgctgaaacaggccgaggagatcggccttagccaggggctggcgatggagcgtcagcaatttgtcaccctggccgccaccgacgatcgccgcgaaggcatcgccgcctttttcgaaaaacgtacgccaaactatcaggggcgctgatttatggataacgcattgattctcagccatctcgacgccggcgtgttgacgctgaccctcaaccggccggatcggctcaacagctttaatgacgagatgcatcgccagttgagtgaagcgctgacgcaggccgagcgcgacgacagcgtgcgctgcctgctgatcgccggcgccggccgcggtttctgcgccgggcaggatctcaacgatcgcaacgtcagcgccgatcaacaggcgccggatctcggcctgtcggtcgaacgtttctacaaccccctgatccgccgcctgaccgccctgccgaaaccggtggtatgcgcggtcaacggcgtggcggccggcgccggcgccgcgttggccctggcgtgcgacatcgtcatcgccgccgacaacgccggctttattcagtcgttctgccgcctggggctggtgccggattccggcggcagctggttcctgccgcggctggccggccacgcccgcgccatgggcatggccttgctgggtgacaaaatcagcgcccaacaggcgctggagtggggcatgatctggcaggtggtgccggcggatgaattggccgaccgcacgcaaacgctggcgcgccatctggccacccagccgacttacggtctgggtcttatcaagaaagccatctacagctcggccaccaacagcctcgatcagcagctcgatctggagcgcgatctgcagcgattgggcggccgcagcgacgactaccgcgaaggcgtcagcgcgttcttcgccaaacgcacgccaaacttcagcgggaaatagccatgaacgcgccccttcttaacggccaggtggcggtgatcggcgccggcaccatgggcatcggcattgcgcaggtggccgccgccgccggtcacccggtgcggctgttcgatatcgcgcccgccgccgcccagcgcgcgatcgatgaactcactcgccgcctgcgccagcgggtcgacggcggcaaggccgacgccaacgccaccgaggcgctgctggcacgcctcgaacgcgccgattcgctcgagcaactggccaacagcgcgctggtaattgaagcggtggcggaaaatctggcgattaagcagagcctgttccgcgatctggaagcggtctgctcgcccacggcgctgttcgccagcaatacctcctcgctgtcgatcaccgccatcgccggcgccttgcaacacccggcgcgcatggccgggctgcacttcttcaatccggcgccgctgatgaagctggtggagatcgtcagcggtctggagaccggggccgagaccctcgcggcgctgcaggccctggcgcagcgctggggtaagcaaagcgtcgtgtgccgttcaacgccgggattcatcgtcaaccgcgtggcgcggccgttctacgccgaaaccctgcgcgcgctggaagaacgggtggccgacgccgccaccctggatgcagtcatgcgcgacgccggcggcttcgccatgggcccgctgcagttgaccgatctgatcggccaggacgtcaattacgccgtgaccgactcggtgtatcaggccttctaccaggatccgcgcttcaccccctctctggtgcagcaggaattggtggccgccggacatctcggccgcaaatccggccgcggcttctaccgctacgacgcgcaacgccccgccgcagagatgatcgcctttgcgccgccggcgcaggccgcgccgccgcaacgcgtcacgctgcacggcgactggtcttctctggccgatttagcggaactgttgatcgaaaatgcgggggcgatcaaacaacctggccagaccagcccgtacctcacgatcgacgacgttacactgatgttaaccaatggtaaaaccgccggccaactggccgacgaacgtggaacgcctgtggtgctgttcgatctctgtgccgactatgcgcatgcctccgccatcgccatcagctgcgcggcgcaaaacggcgcgcaacacaatgccaacgtgattcgcctgctgcagtccctcggcaagcaggtcattcaactgccggattatcccggcctgctgacgatgcgcaccctggccatgctggccaacgaagcgctcgacgtggtgaacaaaggcgtcgccggcgccgaagataccgatctggcgatgctgcgcggcgtcaactatccgcgcggcccgctggcctggggcgccgcactcggctggcgtcacattctgacgacgctggaaaacctgcaacgctattacggcgaagcgcgctatcgcccgatgccgctgctgcgccgctacgcttcccccgcctctttcccaggagccgaacgatgaacgccaatacgccgcgcgcgctggctcagcgctgcgccgaacagatgttccagcaagatacctgcgctcaggcgatggggatgcacatcgacgccgtcgacgccgggtacgcgcaggtcagcatgaccgtcggcccgcagatgctcaacggccaccaaacctgccacggcggccaactgttcagcctggcggacaccgccttcgcctacgcctgcaacagccaggggttggcggcggtagcctccggctgcagcatcgacttcgtccgcccggcgctggccggcgatcgcctcaccgccagcgcgcagatgcgccatcagggcaaagccaccgggctgtatgacgtcgaaatcgtcaatcaacagggcaaaaccgtcgcctggtttcgcggccgcgcgcaccgccttggccacagcattttaggagatcaggcatgaatcaggcatttatctgcgacggcgtgcgcaccccgatcggccgctacggcggcgcgctggcgcaggtgcgcgctgacgacctcgccgccctgccgctgcgcgtactgctggagcgccatccgcaggtggattgggcacagctggacgacgtgatcctcggctgcgccaaccaggccggggaagacaaccgcaatctggcgcgcatggcgctgctgctggccggattgccggtcggcgtttccggcaccacggtgaaccgcctgtgcggttcgggcctggatgcgttggcaatggcggcgcgcagcatcaaagccggcgacgccgggctgctgctggccggcggcgcggagtcgatgacccgcgcgccgctggtgatgggcaaggccgacagcgccttcagccgccaggcgcagctgtacgacaccaccctcggctggcgcttcgtcaacccgcgcatgcaggccgagttcggcaccgattcgatgccggagaccgccgaaaacgtcgcggcgcagttcaatatcagccgcgccgatcaggacgcctttgcgctgcgcagccagcagcgcgccgcccgggcgcaggcgctgggccacctggcgcaggagatagccccggtcagcctcaccggtaaaaaaggcgtggtcaccctgttcagccaggatgaacacccgcgcgccgacaccaccttcgagcagctgcaggcgctgaaaaccccattccgtcagcccggcagcgtcaccgccggcaacgcctcgggcctgaacgacggcgcggcggcgctgatcgtcgcctccgaagcaatggcggtgcgccaggggctgacgccgcgcgcgcgcatcgttgccaccgccacctgcggcgtggagccgcagctgatgggcatcggcccgctgccggccacccgcaaggtgctggagatcgccgggctgagcctggcgcagatggacgtcatcgaactgaacgaagcgttcgccgcccaggcgttggcggtgatgcgccagcttggcctgccggacgatgccccgcaggttaaccccaacggcggcgcgatcgctctggggcacccactgggcatgagcggcgcgcgcctggcgctggccgccctgtttgaactggaacggcgagccggccgctacgcgctttgcaccatgtgcatcggcgtcggccaaggcatcgccatgatcattgagcgtgtctgacccctgaggctaaccatgacaataaatccacagcccctcgaaacgatcgaattcgcctcgcgcgatgagattgaagcgttgcagttggcgcgtttgaagtggacgctgcaccacgcctacaacaatgtgccgatgtacaagcgcaagttcgatcaggcgggcgtacaccccgacgatcttaagcagctgagcgatctggcgcgcttcccctacaccaccaagcaggatctgcgcgacaactacccgttcgacaccttcgcggtgccaatggagcaggtggtgcgcatccacgcctcctcgggcaccaccggccgcccgacggtggtgggctacacccagcgcgacatcgataactgggccgatatcgtcgcccgctgcctgcgcgccggcggcgccaccgccaaagacaaggtgcacgtcgcctacggctacggcctgttcaccggcggcctgggggcgcactacggcgcggagcggctcggcgcgacggtgatcccgatgtccggcgggcagacggaacgccaggcgcagctgatcctcgacttcaaacccgacatcatcatggtgacgccgtcctattgcctgacgctgatcgacgaactggagcgcaagatgggcggcgacgcgcgcggctgttcgctgcggctcggcgtgttcggcgccgaaccctggaccgaagccctgcgccacgaaatcgaatcccgcatgggcatcaaggcgctggatatctatggcctgtcggaagtgatggggccgggcgtggcgatggagtgtctggaaagcggcggcggccccaccatctgggaagaccacttcctgccggagatcatctgcccggagaccggcgtcgccctgccggacggcgagcacggcgaactggtgtttaccaccctgaccaaagaggcgctgccggtgatccgctaccgcactcgcgatctcacccggctgctgccgggcgacgcgcgccagatgcgccgcatgggcaagatcaccggccgctccgacgacatgctgatcattcgcggcgtcaacgtcttcccgtcgcaggtggaagagcagatcatgcagttcgagcagctgtcgccgcactatcagctgcaggtcagccgcagcgggcacctggacacgctggcggtgcgcgtcgagctgaaagaatcggcgctcagcctcagccaccagcagcgttgcgacatctgccaccagctgcgccaccacatcaaatcgatcgtgggcgtcagcaccgacgtcagcatcgccaactgcggcgatatcccgcgctcggaaggcaaggcgcagcgcgtggtcgatctgcggccgcgctgaggcgcacggcgtcacggatgacgccgccccaaattatgttaatgttgtggctcatcgaaggctaacccatggaaaaatatggaacataaactggatgagttcattcgccacgccgtcgacgcgcagccgatcagcggcacctcgctgatcatttcgctgtacggcgacgcgctcagccaccgcggcggcgaagtgtggctcggcagcctgagcgcgctgctggaggccttcggcttcggcgatcgtttcgtgcgcacctcggtgttccgcctgcaaaaagaaggttggctggcggtggagaaaatcggccgccgcagcttctaccgcgtgaccgagcaggggatgcgccagttccgccacgccgaatcgaagatctatctgcgcgagcagcccgcctgggacggcaaatgggagctgttgctgctggaatgcgccgaaaaaaacgcgcgcgcgcggctgaaaaaagagctcggctggctcgggttcgggcagatcgccaacaacctgatggccgcccccacccatgcgcagaccgacgtgacggcgctgctcggcgaactcaacgccagcgaacaggtgatctactttcgcgccgattacccctacaaccgctccgagcaaaccctgcagaaactggtggccgactgctggtcgctcagcgacgtggcggccggctatcacgaatttatcgtctccttccggccactgatggcgctgctgcgcgaagtcgacccggcggcgctgacgccgctgcgctgtttccagattaagctattattgattcacttcttccgtcgcgtggtgttgaaagatccgctgctgccggatgcgctgttgcccgcgcagtgggagggccaaatcgcccgcaacctgtgcatcaatctctatcagcaggtcgatcgcgccgcgacggactacgtcagcgcgctggcggagaccaccatcggcgccctgcccgcgccggccgccggttactatcggcgcttcggcggcctgccgcgcgaccctacatattaaggaactcacgctatgcctgtgtatcagattgacggcctgacgccggtcgttgaccccagcagttacgtgcacccgacggcggtgctgatcggcgacgtgatcgtcggcaaacacgtgtatatcggcccgaatgccagcctgcgcggcgattttggccgcctggtgatctgcgacggcgccaacattcaggacaactgcgtgatgcacggcttcccgcagcaggacacggtggtggaagaagacggccatatcggccacggcgccatcctgcacggctgccgcattcgccgcaacgcgatggtgggcatgaacgcggtggtgatggacggcgcggagatcggcgagaacaccatcgtcggcgcgatggcgttcgtcaaagccgcggctacgatcgaagccaacaagctggtggtgggcagcccggcgcgcgtgctgcgcgatctgaccgaacaggagctggcctggaagattgccggcacccgcgagtatcaggatctggtgcagcgctgcaaatcctcgctgcacgaagtggcgccgctgaccgaaatcgaaccgggccgccagcgcctgagcttcggcgatcacctgatcccgaaaagccagctttaatccccagggctgaggtgcgcctcagcccctcccccgcattactccacttccggcgccttgagcggcgacggcgcagccgcgcggcggctctggaagtgataagccaccaccagcagcagggtgaacggaataccgaaccacagcgtcatgcggaaaaattcggtaaacgcggtcgagatcatcagcgccgccatcagcccgccacccagtaaggtggtataggggaatccccacatgcggaacttcagatgggtctgccggtgccggcggcggaagaacagatgggtgacgaagatcatcagccaggtaaaacaggcgccatacaccgaaatggacatcatggcggcgaacgacgtttccggcgccaccaagctcaggacgatggacaccacgataccgatgcacgacatcgccagcgcattgaccggaatgccgcgccggctgacgcgccccagcgccgccggcgcttgcccggcgcgcgacagcgagaacatcatgcgggtggtgatgtacagctggctgttcatcgccgacagcgccgccaccagcacgataaagttgaaaataccggcggcggcgggcagatggatcacgttcatcgccatcaggaacgggctttcgccggtgccggactggcgccagggcacgatggccagcatcagggcgatcgacagcatgtagaagatgaacagccgcacgatggtgcccttgaacgccgccttcaccgcaatcaccggatttttcgcctcgccggcggccaccgcgatcatttcaatgctcaggtagctgaagatggacacgatcaccgcgaaccacatgcccttgacgccaaacggcatgaagccgccggcggtcaggttgcgcaggccataggccgggttacccgagaacgccagaatgccgatgccgatcagaataaacgccacgatagccgttactttgacggtggacagcgcgtattccacctggccgaacgatttcacgccgatcacgttaacgacgatcaccgccgccgagaacagcagcacccacggccaggtcggcgtcgccgggaaccagaactgcatgtacatgccgatggcggtgacttcggtgcccaccgccaacaccacgcaggaccagtaagaataacgcaccagaaaaccgaacagcgggccgagatagaattcggcgtagtcgccgaacgagccgggcgttgggtgttcggaggtcatttccgccaggctgcccatcagcagcagcgcaatgacgccgccgatcaggtagctcagcaataccgacggccccgccatctgaatggcgtaggcgctgccgagaaacagcccggtgccgatggcgccgccgatcgccagcatcgacatctgtccggcggtaagatgcttgttcaacccgccctgacggcgggcgatatgctcaaaatcattcatctgtggcatggctgtgctcccgggcggagttaggcggtacgggtgacgtcgagaatggcggcggtcacgtagtcaatgttgccggggttaagccccggcagacacatgcggccgggcgagaccagatagatggcgtagcgctgccgcagggtctgcagctgcgcttcgttcaggccggtatagctgaacatgccgcgctgctcgagaatgcgccggtgatccagcgaagagccgccctgcgccagcccggcggccagctgttcacgcatttgcttgatgcgcgagcgcatttccgccagctcattgcgccaaagctcgccgagttcggcgtcgccgagcagggtttccacgatctggctgccatgcgtcggcgggcaggagtagctgcggcggatcagcgtttttaacgcccctttgacgttggcggcattttccgcgtcggcgcagcgcaccgacagcgcgcccagacgctggccgtacagcgcgacgtttttggaaaacgaattgcagaccaaaaacggcagatcggttttcagcgcttggcgcaatgcaaagcagtcctcctccagcccgtcgccgaagccctgataggcgatgtcgaacagcggcagcaggttacgccgctgcagcacggcgagcgtggcgcgccattgctccggcgtcagatcggtgccggtcgggttatggcaacaagggtgcagcaagaccacgctgcccggcggcaggctgtccagcgcatcgagcatggcggcgaaacgcaggccgcccgccgcttcgtcaaagtagggataggttttcacccgcagccccgccccttcgaaaatcgcccagtgattggcccaggtgggatcggacacccaaatttcaccgcgcgtcagaaagtggcgcagaaaatccgccgccagcttcaacgcgccggaaccgccgacggtctgcaccgtggcgatctcggccgcctgttgctcaccgaacagcagcgactgcacctggcgagcgaactgcggcgaaccttcgatcggcggataaccgtgcgggcgacgcagcgccagcagctgctgctcggcggcctcaaccgcctgcatcagcggaatattcccctgccgatcgtaatacagcccaatgcctaaattcacttttttcggattgggatcctgcaaataggcttccatcagcgacataataggatcggcggcggaaggtgcaatctgtttaaacatgacgcatccttaactcgttattgaattaatatgaaggttgacttaagaagaaattaaatcaggcgatggcgctgacggtaatttctattttcattcccggcaccaccaatttttcgacaatgaccgtggagcgattgggataaggataattaaagtatttccggtaaatatcatcgagacatttaacgtcgttgacgtcggtgagatacacgatcacctgcagcaccttatcgctgtggctgcccgccgcctccagcgtctgcgccagattatcgaaggtcagcgtaatctgtcgctccggcgcgccggtgtcgatgctgccgtccgcccgcaccgggccgtgagcggtaaacagcatgccgccgccccgggtggcccaggaaaaaggctggccgatctccggcagcccggtctctacgatctcgcgcatgtcagtggttcccgtggtggttaagttggtgaagcagcgcgccgtcggcggcgaacaacgcatccagaatggtaaaatgattggcgccgggcaccgcgaccagatcggccggcagcccgcgttggcgcagcgctgcatgatagtgttgcgactgacctctcagttccggcagctccaatgcgccgtaatacagcgtaagcggtttgccgcgcgtcggcaggcggcgtgccgggctgagcgtttcaatctgccgcgcgctcagctgcagcgcccgattaacatagctttgttgcaacggcgccagctcgaacaggccgctgatgggaaagacggcatccaccaacgcatgctgctgccagaacgccgccagctgcccgccggcggaatggccgcacagataaaccggatgggcatagtgcggcggcaggcggcgctgaatagcatccagcgccatcccgacctgtcggcatatttcgtcgagatccaccgccggcgccagcgcatattccaccaacaccacgtcaaaacccaacgccagcggcccggcggcgataaaggcgaaatccgccttatcgcagaattgccaatagccgccgtgaataaaaattaacgtcccctgatgccgctttgcagaatagagccaatcaaatgtttctcgttcgccgttgccataagcaatattattttcatggcgcgtctgtttataaacagccgcgctgcgagtttgaaatgaagtcaaaatagccgcttcattatccaccgtggcgccgttatcataactccccgcaagtggtttcatatattaaacttcgtttattatttaaaatgtaaattaactattagcaccggcaagattattgtcaagacgggcgcgtcagcaatgcgcgcccggtaaaataaaacctgatgaataatgaaaaagtttaacccatgaaactttttgcgcttatttcccccgcccgtccggctgaatttgcggcaaggcgctgagccgttcaaatgcataatcccaaaaggcgcgcaccttcagcggcatgtgctgcgcctgctgcgccaccagctgtaccggcatcggcaacggctcatgatccgtcaacagccgcaccagcgtaccggcggccaaatcgtccgccacctgatacgagagcaaccgggcgacgcccttgccggcgcgcaccgccagcagttgcgcttccacgtcgttgagcaacagccggggagtcaatcgcacgcgctcgccgttttcctgcgggccgaagcgccattcgcgcagcgacggccgctgggtgccgacgatggtggcatgctccgccagctgcgccggcgatcgcggttcaccgcagcgcgccaggtaatccgggctggcgaccgtcacccggctgacctgccccagccgccgcgccacgcgggaagagtcctgcagatgaccgatgcgcaccgcgatatccaacccttcgtcaatcagatcgagattgcgatcgttcaataccatttcgatctgcatctgcgggtaatcatcgagaaatgccatcaccaccggcgccacgtagcggcggccgaactgcaccggcgaggtaacgcgcagcaagccgctcaactgcgcctcggcggtatcctgcaccaccgcctgataatcctgcagcagctgttgcgcgcgctccaacagccgtgcgcccgcttcggtaggcgccagccgccgggtcgtgcgctccaccaatcgggtgccgaaacgctgttccagcgcggcgatggcccgggtgatcgccggcgccgaacgccgcagtttgcgcccggccgccgccaggctgccttgctgcaccaccgccacgaaaatcgccaactcgtctaaccgatccatagattcttccgaaaagtgaaattatcaatttccacattgccggatttcgctcgttcaacgcaagagtatgctgacaaaaagcactgaggagaaacgccatgtccaccatcacactctacggcaccccgctttccggccacgttcatcgcgtggcgttgctgctgcgcatgctggcgctgccctatgcatgggtcgaagcctcaacggacgtacggcagagcgcagcctttcgccggctgaacccgttcggccagatcccggtcttgcaggatggcgatctgacgctggccgacagcaacgccattctggtctatctggtgaagcgctatgcgccggacagccactggctgccggaacagccggcggcggcggcgcgagtgcaggcctggctttccaaagccgccggtgaagtccgctacggcccggcctcttgccgactgatcgcccaattcgccgtgccggaggactatcaggcggcgcgagcaatcagcgatcgttttctgccgcagatggaacagcacctgagcgagcgcgactacctggccagcgaacacccgaccatcgccgatctggcctgccacagctacgtggcggtcgcggccgaaggcggcatttcgctgtcgccttaccctgcgatacgtcgctgggcggcgcgcatcgctgcactgcccggcttctttgccatgccggccctgccggaaccggcggggagctgacgccatgatcccgcaactgttccatcccgatgagctgcgcgcgcagacgctggccgggtttggcggcgtaggcggtggcatctaccctgcgatgccggatcagcaccgcgcgtttttcgccgcgctgccctacctgttcgtcgccacgctggatgaacaaggctggcccatcgccaccctgttcaccggcccgcccggatttttacgcacgccggacgacacgcacctgcgtatcagcgcaccgcgtcgcagcgacgatcccgcccaggcgctgttgctgcccggcaaaccggtcggcgcgctcgggctggatttcagcaaccggcggcgcaaccgcgccaacggcaccgtcggccgcaccgacaaaaaccgggtggagatcgtcgttcagcaaagcttcggtaactgcccgcagtacattcagcgccgcgaactctacccggtggacagccggccacagccggttgagcatttagcctcgctggatgcggcggcgcaggcgctgatccgcaccgcggataccagcttcgttgccagctgcgcgcacctggcactggcgcagggcggcgtcgatatttcccatcgcggcggccgccccggctttatccacctggaaggtgacacgttgtggatgccggactttcgcggtaaccgctacatgaacacgttgggcaatctgctggccgaaccgcgggcggcgctgctgttcatcgattttgaacgcggtgacgtgctgcatctgcagggggaaacgcagatcctctggcaagcagaggggcatcccggcgttgaaggcgcagaacgctattggcggtttgacgttcgccgcgcctggcgttttacggcggcgttgccgtggcgggggcgtaatctggagtattcgccggcgacgctggcgaccggggtgtggcagcgctgaaatgaaaagccccgctgcggcggggctggatcggaaattacaggctgtgttcggccgccgatgcggcctgataaagctgacgaaaataattcaaccgcgcaaagaacaggcggctttgctgctccgacatattgccggccacctgcccggcgtcaatctgccgcccttgccattccatcagggcgattctcgacgccaaaaaatccatttcgctgccgtaggccgcgagatgtctgtccactgatttcatcattcgcacactccttttaattacatcgaaaagggtcatatgcctgctctttcagtatcggcccggcgaaggatattttttgtacagaaggtgcgcataaagaaaaccaccatcttgttgccgcgtgggcaaacggcggcggcaaaatttgctagggtaaagggtagccgtatgggatagaccactctgttgaactcagcaaaggaagagactcatgagcaccagtatctgcgctaccctcaaggatcccacgctgttccgcgaggccaactacatcgacgggcaatggttgccggcccaggaaggccgttcgatcgccattcataatcccgccaacggcgaacggatcggccacgtaccggccttcggcgccgaagaaaccgcacgcgccatcgccgccgccaaaaaagcgctgcccgcctggcgcgcgttaaccgccaaagagcgcgccggcaagctgcgccggctgtttgaattgatgatggaaaatcaggaagatctggcgcgcatcatgacggcggaacagggcaaaccgctggccgaaagccgcggtgaaatcgcctatgccgcctcctttatcgaatggttcgccgaggaaggcaagcgggtgtatggcgacaccattccacagccccaggccggtcgccgcatcatcgtgcaaaaagagccgatcggcgtgttcgccgccatcaccccgtggaacttcccggcggcgatgatcacccgcaaagccggccccggctgggccgcaggctgcaccggggtgatccgccccgccagccagaccccgttctcggcgctggcgatcgccgtgctggcggagcgcgccgggctgcccgccggggtatgcaacgtgataacaggccccagcaaaggcatcggcggcgaactcaccgccaacccggacgtgcgcaaactctccttcaccggcagcaccgaagtcggtgcgcagctgctggcccagtgtgcgcccaccatcaagaaaaccagcatggagctgggcggcaacgcgccgtttatcgtgtttgacgacgccgatctggacgccgccgtggccggcgcggtcgcctcgaaataccgcaacgccggccagacctgcgtctgcaccaaccgttttctggtgcaggacggcgtatacgatgctttcgccgccaaactgaaagccgccgtcgccaagctgaaagtcggcaacggcctggatgacggcgtcaccatcggcccgttgattaacccggacgcggtggaaaaagtgcgcgagcatatcgccgacgccgtcgagcacggcgcctcggtgctgctgggcggcaagcctgacgcgctgggcggcaatttcttcaccccgaccatcctgaccgatgtgccgcgcacggcgaaaatcttccgcgaggagacgttcggcccggtggcgcccctgatccgcttcagccaggaggccgacgccgtcgaactggccaacgacacgccgttcggcctggccgcttacttctacagccgcgatatcggccgagtgatgcgcgtggccgaagcgctggagtacggcattgtcggcatcaacgaagggttgatttccaccgaggtggcgccgttcggcggcatgaaacactccggtttgggccgcgaaggatcgaagtacggcatcgaggactatctcgaaatcaaatacctatgccttggcggcgtggatgcctgatgcgttcggcccccgcacctgcgggggttctgtctggcgtttgctatctttaggttaggcatctttgtgcggttaaaagggattgtctctatgcggcccatctcggtacatctgcccggcttttacgtcgccggccaaacagtcagaaccaccaaccagaacgaaacccaagccgaaacggcaaagattcccgcgctgtggtcggattttttcgctacctcacccgccctgccggtatacggggtctattccaattacgcttccgacgccagcgggccgtttgacgtcaccgccggcagtgaggcacagagcggtttacacatccaacccggccgctatctggtcttctccgcccatggcgcgatgccggcggcggtcatcgcaagctggcagcgcatctgggcctacttcgaacaacaccctgagatcgaacgccgcttcctgaccgacttcgaagcctataccggccccgacgcggtcgatatccacatcggctgccgctaacgcgacaatgaggtcaacgatgatcgccttctcgcccgccattccgatcctgcgtatcttttcggtcgacaaggccaaagagttttacctggattttctcggtttcacgctggaatgggagcaccgtttcagcgaagacctgccgctgtacatgcagattgcccgcgccgggctgacgctgcacctgagcgaacactacggcgacagcacgcccggcgccgccattttcattccgatgcaggacatcgatgcgctgcaccgggagctcacggccaaaaactaccgctatgcacggccgggcctggagattgtcgattggggcaaggaactgaacctcaccgatccgttcggcaaccgcctgcggttctgcgaacagaaccgcagatcctgagcgccgttattgccggtactccgcctcgctgaccggctccagccaggtcaccggagtgccgtccagcgcttcggcgatggcgatatgagtcatggcggagtccggcgtcgcaccgtgccagtgtttgacgccagccgggatccagacgatatcgccggggtgcatttcctgcgtggcctcgccccacatctggatccaaccgcgcccctgagtgacgatcagcgtctggccgagcggatgcgtatgccaggccgtgcgggcgccgggctcaaaggtgacggttgcgccgcccactctggccggcgcttcgccggcgaacggcgcgtcgatgcgcacctgcccggtaaaataatccgccgaaccgcgctgtgatgggatcgaaccgctgcgttgtattttcatctgttttatcctccgcgccggctctcacaaccggcgctgatagtcataagtgagtgatgccaagatagcgccatgcttttccgccgactagcgggtaaaatgcgcaaggagctatgagctaaattcataaatctacgcgcagccgcgccctaaccttgctcttcggtgccgatatgttgaaagaaaacgttaacgacctgatcgctttcctgatggtggccagagaacgcagcttcaccaaagcggcggcgcagcttggcgtttcccaatcggcgctcagccacgctatacgcgggctggaagagcgcctggcgctgcgcttgctcacgcgcaccacccgcagtgtcgcccctacagaggccggtgagcggctgctcaacagcatcggtccgcgctttgcggagatagaaaacgcgctgaacgcgctgggtgaaatgcgcgatcgcccggccggcaacatccgcattaccgccggcgaacatgcggtggatgcggtgctgtggccggtgctgcggactttcctcatcgattacccggacatcaacgtggaaatcaccgtcgacaatagtctggccgacatcgtcgtcgggcgtttcgacgccggcatccggctgggggaacaggtggcgaaggacatgatcgcggtgcgcatcgggccggacatgcgcatggtggccgtcgcctcacccgcctatttcgcccgtcacggcctccccgccacgccgcaggcattgcaaaaccaccgttgcatcaacatgcgtttgcccaccctcggcgggctgtacgcctgggaatttgcccgcgatggccgggagatcaaagtacgtgtggaggggcaactgaccttcaacagcctgcgccagcggatcgacgctgcgcagctcggcctcggtatcgcctttgtgccggaagacagcgtcgccgagccgttggccgacgggcggttgcagatgacgctggacgactggtgcccgccgtttcccggttattacctctattatccaagccgcaggcaacacaccaccgcctttgcgctgctgattgaggcgttgcggcgcggggcttaacgcccgacgtttttctgcagatgcgccgggtaacgatcgccgatcacgtcgatagcggagagcgcgcgctcaatctcgcccagttcgtccgccgccaacaccaccgacgccgccgcgaggttctcttgcagccgatgacgcttggtggttcccgggattggcacgatccacggctgttgcgccaacagccaggccaaggcgatctgcgccgacgtcacgcccttgcgctgagctatctgccccagcacgctcaccagcgcctgattggcccggcgtgcttcggcgctgaagcgcggcaccaggttgcgaaaatcgccgctgtcaaaggcggtgtcttcggtgatggcgccggtgagaaagcccttgccgagcgggctgaacggcaccagaccgatgcccaattccgccagcgtcggcaagatttcacgctccggctcgcgccaccatagcgaatattcgctttgcagcgccgtaatcggctgcaccgcatgggctcgccggatggtttgcgctccggcttccgacaagccgaagtacttcactttcccttcgcgaatcagttgctgcaccgtaccggccacctcctcgataggcacttcgggatcgacgcgatgttgatacagcaaatcgatcgtctctacccgcaggcgcttcaacgaaccttccaccgcccggcgaatatgctccggacggctgttcaacacctgttgccccgccggctgcggcagatcgaaaccgaacttggtggcgatgacgacccgatcgcgcaccggcgccagcgcttcgcccaacaattcctcgttggtgaacggaccataaatctcggcggtatcgaagaacgtcacgccctcgtcaaccgcggcgcggatcagatcgatcgcctgccgtttgtcggtggccgggccgtagccaaaactcagccccatacagcccagacccaacgccgatacttccagcccttctcgccctaacttgcgtgtttgcatcttcactctcccactgaatgatactggctccgcctgacgcggcgccgctccggtgtggtgactgtaaaaggcggctgccgccatgactatggggcaaaatacgcttgagcttatgaaccaggctcatgaatccgttaaccgttgctgggaccagcgtttttgcgggaacgttcctgcccgagatactctatactgatgtcaggatgccttacccttttcgtttagcgtcatgtagatggagcgacagatggctaactctgaatcgacctgcgattccctttcaataccagtggcagatttattccatgaccaataagaaaagcgccgtgcttaccccggctgcaatgctattgctacaacccatgtttgccagccaggcgctggcggcagaaaataatgaagagaaaagcgacaccctggtggtgatggcgcaacccatcggattgaccgagctgggatcgccggtgtccgtcagcgtgatcgacgggcaagacctgcgcaacgccgccccgcagattaacctgtcggaaaacctcggcagcgtgccgggcctgcagcttcaaaaccggcaaaactatgcgcaggatctgcagctgtcgatacgcgggttcggcagccgctcgatgttcggcgtgcgcggggtgcgcatgtacgtcgacggcattcccgccaccatgcccgacggccaggggcaaacctccaatatcgacatcaattccgtcgaacgcatcgaggtgctgcgcggcccctattccgctctatatggcaacgcctcgggcggggtgatcaatgttgatacgattaccggcacccagccgccgacgctggaggccggcggctatttcggcagcgacaacacctggcgctacggggtgaaagcgaccggcgccaccggcgacggcacccaggccggcgacgtcaactatgctatatcgggaacccgcttcactactcagggctatcgcgatcacagcgccgcgcgcaaaaacctcggcaacggcaagctcggcgtgcggctggacgacgtcagcaccctgacgctgatgttcaacagcgtctccattgacgccggcgatccgggcggcctgaccgaagcggaatggaaggaaaacccgcgccaggcgccgcgcgcggatcaattcaacacccgcaaatcgctcgatcagacccaggccggcctgcgctatcagcgccagatcagcgagcgcgacgaactgacgctgaccgcctaccacggcgagcgccacaccacgcagtaccaatccattccacgcgggccgcagctcaaccctacccacgccggcggggtgatcgtgctggaaagaaaatatcagggcattgacactcgctggaagcatgaggatactctcgcctcgttaccggtaacactgatcggcggtctggattatgaaaccatgaccgaacgccggcaggggttcgaaaactttattctgcgagacggcacagtggactacggcgagaaaggcgaccagcggcgcaacgagaaaaaccgcatctggaacctggatccttacctgcaaacctcctggcaactgacgccgcactggacgctggacgccggcctgcgctacagcacggtcagcttcgactcgaccgactattacatcacgccgcgcaacggcgacgacagcggcagcaaacgttaccaccagtggctgccgatgggctcgctcaactataaaatcaacccggcgtggaacgtttatctctccgccggccgcggctttgaaaccccgaccatcaacgaactctcctaccgccccgacggccagacgggcctcaatattggcctgcagccatccaccagcgacaccgtcgaactgggcagcaaactgcgcctcggcaacggcctgatgagcgccgccctgttccagaccgataccgacaacgagctggtggtggcggaaagcagcggtgggcgcaccagctacgccaacgccggtaaaacccggcggcgcggcctggaactggcgctggatcaagagttcgcgctggactggcgcctgcatatggcctggacgctgctggacgccacctaccgcagcgaaatgtgcggtaaatccggctgtacccccgccggcaatcgcctgccgggcatcgcccgcaacatgggctacgcctcgctggcctatgccccgccggaaggctggcacgccggcgcggagctacgctacatgagcgacattcaggccaatgacgccaacagcgcgcaggctccctcttacaccgtggccggcgtaaacgccggttatcgctttacctggaaccgctgggcgctggacgtgttcagccgggtggacaatgttttcgatcgccgatacgtcggttcggtgatcgtcaacgaaggcaacggccgctacttcgagccggcgccggggcgcaactggggtggcggcgccaccttgtcttatcgctttgaataaggcaaagcaccttaaggttaaaaaacgggatgggttttacgtcaccctagcggcttctcgctgaaataatagggagaaaccgcgtgttttttccgatttggcttaatctctaaatcggggactttcatttttggtaagggtattgctatgcaaaataaagcgtcactatcgccgcttatcgtcataacggcgctgtttgccgcgctgagcgggctttatctgctcggcggcggcatctggctggccaagttgggcggttcgctgtattacatcatcgccgggctggtgctgctggcgacctcctggctgctgttccgccaccgcgccaccgcgctgctgctgtacgcggtatttctgttgggcaccactatttgggccctgtgggaagtgggcccggacttctgggcgctgacgccgcgcctggacgtcaccttcttcttcggcctgtggctggtgctgccgtttatctaccgcaagctggtggccaacggcaaattcgcctacggcgcgctgagcgcggcgctggcgatcaccgtcatcgcgttggcctatgccgtgttcaacgatccgcaagagatcaacggcacgctcgacgccgcgcaggtacagccgaaagacgccaccggcgccgactggccggcctatggccgcacccaggaaggcacccgttactcgccgctgagccagatcaacgacaaaaacgttggccagctgcaagaagcctggcgtttccagaccggcgatctgaagaccgccaacgatccgggtgagatcaccaacgaagtcacgccgatcaaaatccgcgataccctttacatgtgtacgccgcaccagaagctgtttgcgctggatgccgccaccggtaaagaaaaatggaagtttgatccgcagctgaagtacaacccaaccttccagcacatcacctgccgcggcgtgtcttaccacgaaaccgccgcagccgcaggcgccacaggcgatgccgcaccggcgatgtgcgcacgccgcatcattctgccggtcaacgacggccgtctgttcgcactggacgccgaaaccggcaaaccctgcccggacttcgccaacaacggtgagctgaacctgcagagcaatatgccgtatgcgacgccgggccactacgagccgacctcgccgccggtgatcaccgataaagtgatcgtcatcgccggcgccgtgaccgacaactactccaaccgcgagccttccggcgtgatccgcggcttcgacatcaacagcggcaagctgctgtgggccttcgatccgggcgcgaaggatccgaacgccatcccggcggacgagcaccacttcgtgcctaactcgccgaactcctgggcgcctgccgcctatgacgccaagctggatatcgtttacctgccgatgggcgtttccactccggacatctggggcggcgatcgcaccccggaaatggaacgctacgccagcggcctgctggcgctgaacgcctccaccggcaaactggcctggttctatcagacggtccaccatgacctgtgggatatggacgtgccggcgcagccgaccctggcggacattaccgacaagagcggtaaaaaagtgccggtgatctatgtgccgaccaaaaccggcaacatcttcgtgctgaaccgcaccaacggcgaactggtggtgccggcgccggagaaaccggtaccgcagggcccggccaaaggcgatcgcctgtcgccgacccagccgttctccgagttgaccttccgtcctgagaagaaactgaccggcgccgacatgtggggcgcgaccatctatgatcagttggtctgccgcgtgatgttccacagcctgcgttatgaaggcaccttcactccgccttccgagcagggcacgctggtgttcccgggcaacctgggcatgttcgagtggggcggcctggccgtcgataccgatcgcgaaatcgccatcgccaacccgatcgcgctgccgttcgtctccaaactgatcccgcgcggcccaggcaacccgattgagccgccggaaggcgacaaaggcggcagcggcaccgagtccggcgtacagccgcagtatggcgtgccgttcggcgttaccctgaacccgttcctgtcgccgttcggtctgccgtgcaaacagccggcctggggttacatttccgccgtggatctgaaaaccaacgacatcgtgtggaaaaaacgcatcggcaccgtgcgcgacagctcaccgctgccgctgccgttcaaaatgggcatgccaatgctgggcggcccggtgaccaccgccggtaacgtgttcttcatcggcgccaccgcagacaactacctgcgcgccttcagcgtgaccaacggtgaaaaactgtgggaagcgcgcttgccggccggcggccaggcgacgccgatgacctatgaggtcaacggcaagcagtacgtgctgatctacgccggcggccacggctccttcggcaccaagctgggcgactacgtggtcgcttacgctctgcccgatcagaagtaaccaccgccgttagtaccccgcaaagcacgccgcaaggcgtgctttttcttttcccgccccgccggctgttccctcgcaatacccttaattttttcactcgcattattgataatggttatcattcgcaatattatacctctgcggccccggcagcggctgcgatcctctccagcttaatgggcaatacaacgatcggccgccttcgggcggccctattcggaggcgcatggtcgaccatactcggaagcatcgaaagaagatcctgcaagcggcggtgaaaacgcgacgcgccggcctgacgttcgcgccggcgtcgccagccacgtcgccctttatcggccagcaccgccagacgcaagccgtgctgatacacctgatcggccatgatgacgcccaggaggaacatgaatgaatctgcagccctttaccgccatgctgatgttcgcctatgtgctgctgatggtgccgctgctctacgtcatcgacagccgcctgagcgccagcaaactggtgcgcaaagccacgcaaaacctcatcatcatcgcgttgacgctgctgttcttcagcgcgatgacgcttttatactgaggccatctcgccggtgccccgcggccgacgttacccggcctcccggcgtttggcccgcggatatttccacagccagcgcccgctgaccatgcgccagtagaacaaggcgccgcgcaccgcccaatcaaggaacatccccaaccagacacccaccacgcccatgcccagttcgatacccagcgcgtagcccgccaccacgcggcagccccacatgccaagcatcgtcacccacatggcgaagcgggcgtcgcgcgcgcctttcagcccggcgggcaacacccaggaagcggcccagatcggcataaaggcggcgttgagccaaatcagggttttcaccaccgttttcacgtcatcctgcgaggtataaaacgcggcgaataccccggccaacggcgccgtaccccaggcgatagcggtcaacccgagggtagacagccagaaaatatggcgcagctgccgttccgcctgaccgatctcgcctttgccgagccgccggccgacgatgatggtcgaagccgagcccagcgcattgcccggcaaattgatcaacgaagcgatggagaaggcgataaagttaccggcgatcacgttggtgcccatgccggcgacgaacatctgcgtcaacagtttgccgccgttgaacagcaccgactcgacgctggcgggaatgccgatccccagcacttcccacaggatgctcatcttcagcggcgtgaaatagcttttcaacgtgatgtgcagcgccggattaaaaccgatcgccagcacatagaggatggcgatggcgccgatatagcgggaaatcgtcagccccagcccggcgccgacgaaccccagcccgtgccagcccagcatgccgtaaatcaggatgctgctgatgatgatattgaggatattcatgccgccattgataagcagcgggatcttggtgttgcctgcgccgcgcagagcgccgctgccgatcagcgcaatcgccgccgccgggtagctccacaccgtggtttgcaggtaagagagcgccagcgctttcacctccggcgaggccgcgccggcgatcacatcaatgatcggttcgcccgccaggtgaatgcccgccgccaacagcagcgccacgccggtcatcagcaccagcgactgacgcgccgccgcccgcgcccgccggcgatcgcgcttgccgaggctgaaggccaccaccacggtggtgccgagatccaccgcggcgaaaaaggcgatgatcaccatgttgaagctgtccgccagccccaccccggccatcgcctctttgccgagccaactcaccagaaaggtgctcagcacccccatcaacagaacgcaggcgttctccagaaaaatcggcaccgccagcggcgtgatttcgcgccagaacagcacgcggtagcttttccgtttggcgtaccagggcgtattttccacgcgctgacgcagtgcggcatacaggttcaaggtgggctcgatggataaaagtgaaacatcatttcaaatgatgagcgataaatcgttatcctgcaaagaatttttgggcgcccgtggcgaacgcccgacaggcacaccgcagcgctactccatgtagtcttcctgatcggcctgcgccgccgcgataaagcgcgcggtgctgcggctgagcgtggcgcatttgtccgtcagcagctgattgtcctgttgcagagtcaggtaacgcgcctgggtgagcgccggcaactgccgataccctgccgcctgcgtgtcccagccgcggtgctgcgccgcacgcattgcggtgcgctgcagcttcacgtcgtccggtatctcgctgcgcccgcagtccacgcgcaggaaatgcccgccggccaacatcaaagcgatgtgatccaattgcgcctgcagcggcggcgccggttgatgcgccgtctgctgacaacccgcaagcagcaacaacgccgctacgccgcaaagagacgcgcgaaacagagtagacatggacgctcccggaaacctgtgggtgatgcaatgatcttaggtgagcggatgccgggcggcaaggcgggcagcacgcttagcgccggccgctgctgaccttggtggcgcgggcggggttgccggcgacgaattccagcgtgggggaatagtaaaacggcaaccaggcgttatagccgctctcccactcccatttgaccgggcaaggccacagcatgtcttcatgcaggatgtaatagatccaccgcccgggcgggcggcgcggtttgcgcgttttcatagcgggttcgacggcctgatggaatgcgatagggtcaactgctgcattttaccgcgatttgggccgcggggacagcctgcgttgccggcttcggcttcgcccccggcgcccgcaagcgccctttattcaccgccgcctgccggcgcgccgctctcggtccccagcaccaccaccctgtcggccgagtcgatggtcgactttctgtgggcgacgatcacgcgcgtaatattcagcgaagatatcgcccggttgatcgccgactcattctcaacgtccagatggctggtcgcttcatccataaacagcacgctcgggcggcgatagagggcgcgcgcgataaacaaacgttgcttttgcccgccggagatgccgttgcccaactcgccgatcagggtttcgtagcccatcggcatctgcatgatttcatcgtggatattgctgtgtatcgcgcaggccatgatcagctctttattggcattgacctcaaacccgctgatgttttccgcaatggacccggagaacagccggtcgtcctgcagcacgcaggcgatcgcgttacggtagttattcaccccgactttatggatatccatcgcgtcggccaaaacctggccggaagtggggctgagcaaaccgcacatcaccttcagcaaggtggtcttgcccgcgccggaggcgcccacgacggccacgctttcgccggccgcaatgcgcatgttcaggtctttgaagatcggccgcgacagcgcgtcatattgatacgtaagattttttacctcaatggcaatccccgtgcccgaggggaaaacctgtcgcggcgcggactccgtctccgcatcggtaaagacgatgtcggatatcctctcattgtgcagcgacagcatgcgcaagccgatcgccaggtcgatcaggctcgaggcccgctgagagaactggccgcgataggcattgaacgccatgaacatgccgagcgtcatggaattgtcgatgaccatcatggcgccaagccacaggatcgccacctgatcgagcgtcgtgataaaggtattgatcccgccgaacatcatattgaatcgggtgattttgatattggtattggcggcgtcgacgttcagattgagccaatagctggagcgcgtttccttgatgcccagcgccttgacggtagaaatgccgtacagcgtctccatgaaatgcgagttggccttggccgccttgacgatctgctcctccgagaattgacggtaggttctgtaagtcatcatcctgatgaggatgtagatcagagtgaagcccgccacgacccagaccagccagccaccatagaccatcatcatcgcgaacagcccgaccgtcatgatgccgtcgatgatcccgctgacgatattattggtaaaggtggttctgatcgcatccagcgaggaaaagcgcgattgaatgtcccccaggtgccgtttttcgaaaaaatccagcggcagcttcatcaggtgttcaaacagcgtcgtcttccactgaatatcggtcagcgtcccgagcacgatggagatccaggccctggcgatgctgaccaccgcgcggaacaaggtgaagaagatcagccccaaacagatgaccgtcagcaggctgtagtcatgcgcctgaatgacatggtcggtcaccagttgcgttcccaccggcagcagcaggttgaccgattcgatgactatcgataacgcaaagatcttgagcagcgtccccggcaggccctcgatgtttttcatcaaatccagcaggcgcaaacgggtcttgagggtctctttttgaaatgccctgtcgggccacagctccaacgcgatgccggtaaaatgattcgacatctcctgcagcccgatcactcggcgcccgaaggccggatcgtgaatgacaaaaccggcgcgctgcaccttaaccaacaccacgaagtggttcatattccagtgcagtatgcagggcgttttcagctgattgatttcgtcgatgtccaaggacaaggcgcgcgtcttcagctggatttgcgacgcgatttgagagatcgtccccagggtcgcgccctgggtggaaatgccgaatcgttgccgcaggctcagcatatccacattaaacccgtaataggaggcgatcatggcgaggcacgccaggccgcattccgatgattccgactgcaagatgctcggcacccgcttgcgcagtgagaaggttaacttctcgttgatccgttcaaagagattattgtccttcatcgactcgccccacaacgctgttttttatgtcatacaaaggcgcgaccgcccactgataaagcggtttcttatccaggaagacgatgaccctggcctgcagcccgctgctgatttcgagatatttgcctttatcgctgaattgcgtgtcgctgatggacgccagcactttgtagtaggcgttcctttcccttttatttccgctgctgtattccgacatttcctgcggggaggcggggaccgatgagatggattctatttttcccggaaactgaccgaatttatccgacgggaaggcttcatagcgaatgttgatgccatcgccgattttcacgtagggcaaactgttattcggcagccataaaaccagataatatttgatgttatcaatcggcttgatttgcgccagactgctgccgctctcgaccacctgcccggcggtcacgctcagcgactcgattttccccttgagcggcgctttgataatgacctgaccgccggcattggactccgccagctggcgttgtaaatcactgcgttgcgattcgctttgcgatatctgattgtcgtaatcggcggcgcgaatcagcaaatcgctgcgcaactgcgacagctgaatattttgctggatcttttggctgtagagcgcctgatacgagctttgctgttgttgaaaaagcgaacgctgataatttaactgatctttggtgatcaggcctttcgtcaaatagtgttcgtaatttttcaggctatcccgcattttatccatcccctctttggcgctgaggttcagtttctcggtttctttataggcgttttcatagctattgatctgtttgcgcaaattatccagcatggcggttttatttttattcagcttgctgattatcgaatccagattgctaatctgtttgcttatttcgctggccgcgatatggctgacattgccggacgtggtgcttctcgagacatcaatcacatacagcggctcgtccttttccacgacgtcaccggctttatggaatgcctggctcacgtaaccgtattgggaagaaaacacattggtggaatgcgggatgctgatcacctcgccttcaacatcgacccggcgcgtgtactcgcaaaaatagagtgcgcccgccaggatcagaataaaagtgaaacaggtggcggcaatcacatggctcgacgcgccggaaattaacagcgccctgccggtccatctttgacgttgataattgaccgcctcctggcggaaaatattcctgctcttattatcactcataggaagaacctgcgcttgcctgaccgggagacagccgcagcgagaacgctgcggctttggaccgcatatggatttagctgatggtgccgttaatcagcccatcgaggccttttttggagtattccagcgtggtgtcccagccaataacggctgcggccacgccgctggctacgccgcccaggatgccgccggcgaccatgccgacgccctggccaatcgagccgacgcccagcaggccgccgccgtcgccgccgtgcttaccgccgatgacggcgcccgccatgctgcccacggaggcgcccagagcgatggatgaaacggcttccgcggcattggaaacggcgctgccaatcagccccgacagtccattgctcatatcccaggaataagcgcctgacacttcattcatttcgataacagacagttctttcattggttaatctccatatttaaacggacaaacacggccatacatgcgtgttgtcattgcattggcatcggcctgcagcgcctgatgccaccaataatgtcgcgcgaacagacgacattatatttttaatgggggtctctttaattctgcgtaatggtgaatgtcatcaccgcgtcggcctgcccggggctaatggctcccgtttgcttatagcgcgccatcaaggggatcctgatctctttttcagccgcggtgtggtaattgatcggtctggaaaacgttaatggattacggttctcatccaacacttccacggcgacgcccttcgccgcatcggcaccgtcggcgatatcaatcattcccacgcctggcgaatttccggccgcctcgaacgtgacctgaaccggaatattgtcctcctgacattgcagaaccacggaaaaattgcgttcggaagacgccgccgtgctgccgacgccgttaaactcgctgcgtttagggctgcccagattcaccgtttgatttttatagttcaaatcaaccaggcaacttttctgaatgaccttcatgccggaaatactgagatccaaaatggaggtcgaatccagataatatctggcgataattttcccgcccatatcgccgccggttttgatcggaccggttttaataaacgtcagccgaacatcgtttcgattgatccacggcgtcagcaagttgggcgaaatcgccgtgttgacgggcacgttcttattgctctgccataagtctgaaatcgtcacccccacgccctctatgccggtttcaaatacgccgggcagcgcgctcggcgtcagcggcgacatggagcgataggcgaccgaaccggaacaaagaaaagaaaacgtcgtgccgttcatactgttctcggttcgaacagccaactgctcgccgacttcaatgcgcggatccacggccagcgtcagcaaccccatacgggcggttttcgcgttggtggtacaggtgccggcataaaccgccgtcgtgagcgtcgccagccacaccagggcgccgtaaccgaatatcctgagaaaaacgttcattttcactctcacttaaaagtcatgatggaaatagagcgagatctattggcaaacgccgtttagggtttggagacccgctgacggcggctccgccggcaactgataacggatgcggcattggttctcgccattcctgccccactgcgcgatgagcaggcccttttccgccatgccggtcagatagaccacgccgtcgccgccgaccaggaacggctgagtcgccccctcggcaagacgcaggctggcgcccagcggcaggggggccccctgcgagtccgtcaccttcatcaaaatccgtctgccgacgttggctttgaaattcgcccggctcaccgcgccgcgagtcggcgtgaccgactggttcgtcaactcgagatcgacatcatccggcaagctgtcgacatcgaggcgaatcgaattgttgcgataaggtgtggcgtaaggaacgatcgcgtagccgcgccagtcggttttcaccccgacctgattgccgaccgccacatcgctcgcgccggccgcctgcaccagggcgacggtttcgccgaacggttgaccgaaggtcacgccgtcttcatgggcgatcaccccgcccttcaccccgtagttgacgcgctgttgactgcgatcgtaggcgtagcccgccgtgagttcgccgtacgtcgcgcgccagtcggcgttggcgttgccgctgttgccctggccctggctgccatacccttcctgtacgctccaactgaggttgccgccggccagcgccgtgccgttgaggcccgccgtatggctggtattgccttttttgctggtgttgaggttgtaggtggcgtaggtgttgctcagccatttctctaatggcacgctgatgttgaaagcgaagatctgatcgcgatcgtaaatgcgcccgcggttcgaatcaccgtaaatagcctgtgaattccggctgtagctgtagttaaaaccgtagctgatgccattccaactattgttgtaacccgcgctcagcgactgcatattgcgctcggagccccaatagtcttcggagaccgcgctgagtgaaagcgaccccgccccttcccataaattctggttcagcgtgatttcgccgcgatttttgcggcggtctatcggggcgtaacggttgccgctgcgataggtgtccagcacttcctgcagcccatagtagccgctggtcgaatagcggtagccggcgatggcgaagttcgtccccgtctcgacgatatttttgctgtagcgcacacgccacgactgaccatcgcttttcggctgatgctcctgctttgcccacgcctgggtgacgtcggccgacagggcgccgaactcgcccaggttcttgcccagacccaatgccagcgattgatacggcccggcgaattggccgccgccatacagggtgaaaccggcgggcaagccataaatcaggctggcctgcgagaagatctttttatccacgctgtgatcgtaagtgcggtattgccccgaggtcagcgcatatttcagccgcccttcgcgttgcagcaccggcaggctggcgaagggaacggtcaggtgctgttcgctgccgtccgcctccttgatagtcacctccaaatcgccgctgccgccggtcgggtacatgtccgaaatttcaaacgcgcccggcgcaacgtaactctggtagatgacatagccgttttggcgaatgaccacttgcgcattgctgcgcgcgatgccgcgcaccaccggcgcataaccacgcaggctttccggcaacatgtcgtcatcggaagccagctgcgcgccgcgaaacgacacgctgtcaaacacatcggacgggctgctgctttcgccgagcgtcagcaagcttttcaggcgaataatattgcgctgggcgtaggtatagacggagtcccaacgatcctccgacgctcgcccgccgccggcgctgttgtagctccaggtggtgtagttccgcactcgccaggcgcccaggttgaagcccggccgcaggttgaggtaataactgcttgcgctctgggtgaatcgatcgcgccccttgctgttgctgccggtgaagccgtagttcagcagcatcgccggcaggccttcatcccattgttccggcggaacgtatccgcgcaccttattttccaacgccgcctgggggatactcagcatcaggcgttggcggttaaattgaaattgcgccgaggcctgtgggatcgcggccaaattcgcgcagcgatcggcgccggccaaaccgggaaacagctcaactttcaccccaagccgtttcagatcttcccgcgtcaaacaaggctgcagatcggccttctcgtcgctgccggcccgcagagcgaacgacacctcgcgcgtttccagcagcatgtcgttcacccaaatatcgacccgatacgtgccgggaacctgctggccattttcaaaaatcgacagatcgacgtgctgctggcctgagcgcccagtttccagcaacgccggattaaaatagtcacgagagaaggcgggattagccatattgccgcataccgccgttgttaccgtgaataaggctatgcgtttcagccaagcatcccgcttcgctaatatacgcttttgagttatcattcattagctccattattgaaatgttttatccctttttctgccttcccttacagattaaatacctgactgatgttctttacctgtgccgccataatcattaattaatttccagcttaccgacgttgcgcccgccacgggcaatacaaacatttcgctgctcatcggcgcgatatatgccacctctttcatttcccgccccccgatacggacataatggaagttcatataataaggcgttgggttggtgagttttaattctgaaccgacacgctgccatttcagctgctgcgtcacttcttcgggtacctggcggagcagcggcgccggccgataaatcaatttaatgcgggtcttgaccgctatttgcagcgtattcgatttacccgtctgtgttgttgaaggaatggatttaatattcatccaatacaagctttctttatctttcggtaagtcatcgcccactttcacgatgcgcagcatattttcctggttgccgtccaaccgaaataaaggcggcgtaacgataaacgcgattttatccactccgctttgttgattatccagccaggactgaatcaaatacggttctttatccggattctccacgctgattgacgcttcttttttttcgccgttgaatatcacccgcgtcccgccaatcaccacgccggcgtgaaccgtagacgcaaacaataaaataatgagagccgctaaggcgccgtagcgattaaaacgcataatattatctccgaggcaatacagcccgctgtgaaccagcgggcaagaaaatattatcagttataattcagcgtaaaggtggcgacgctattggctttaccggcggtcacatctgcctgcgtggaaatatagcgggcggtaaaatcgaggttatttttcacgccgctgccggaagccaacggataagccgtcgacgccgtgtaaagcggcagaacactgttagaaatatcagacagttggataccgacaccggtagcgacatccgtttcctgagtcagctgcaatacgttgctgtcgccgttatcggccgcgccgtcaaacttaacggtggcgctttttaccgtatccggacaatcggtgacttccagcgtgaattttgtcgcgctggacgttgatcccttgccacccgcaaatgccgttcgggccacatcacccaaaacaacatttaatggattactcaagtcattcgtgaccttgcacgcagcatcgacaatattcccggtaaaattaacctgaccatctgctgccagagcaggtaaagcgcttgaacacgctgccgcgacaaatgccaacataatcacttttttttccatcatgggtacttctccttttgattagacagacttcaaaatatccccgccacggagatcccggacagggagaataggagccccgctcctttcacagttaattatgcttagctttccccctttagcaatacataaaatcaatgtaaagatgagaaaagataattaccccaaatagaattagcatcattcttaattttattttgaaaaaaccgccaaatcggcgtttcttgattcattcatctggcagcaagagaatttattctcgcgctattcgaaggcgctttcgccagatcctcctcatttccccctcaggcgaaaaatcaggtgacatcgccgtaaaatgaaaaccgggcgaaaaaactcgcactgaaataaatgacatttatattacgaaagacatcacgacgcggcggcagcgagaggggcagcagaatagcaaaagcatggcgataaaggagggagaataaggcattcgccgttcgtgaaaccggcgcgatcatatgacaacgagaaaatggcgttacgcagaaatattctgtctggcgccgttcactatttcgaaaataaggcggcaatgcgctctgtcgcgcagaataacgcattgccgccttattgtttttcggcgccgctaattaatcgtcatggcgataatcttcacccaaccctctgccgggtagggtttcacacgccagaccatcgcccgcgggaacggcggacggatagttatcgtccggcgtgataaagaccggcgtggtcgcgataaacccatcgttgaacaccgcctcaataaaggtggcctcccagccttgcgccggggcggccagacgaaactcgccgcgatcggcctccgctgcggccaacggctccggggtaaagcgtacgccgcacgaataacgaaaatctcgggccgtgcggttgtgcgcgctccagcgccgcacggtggccggcggttcggaaaaacgcagcgtgcgcaccgcagcatccgcggcgctgccttgcacctcgatcgtcggcaacgcgatatcgcgctggcggcgcttgatcatcgccagtatggcgcgttcggcgaccggccggcttgccgcacgatccccgtcggcaatcgcgcgcagcgaagcctctcccgctgaggcgctgaaatagaatcgcgtgctgtccggcggataacgttcgtcgccgctggcgatgatgacatatttcggtaccgctggccgcgctcccgccgtcggcggcggataagcggtgggatccgctatttgcatcagtttatcgaacgccggcgtctctatgcgccgatcgatgccgagttggtaataaggatgaaacgccaacggccaacggccgccatacgtacgataggtatgcttcaagacctgccgcgccgcgaccccatccgggaacatggcgacgacggcatcgatgcgctcatccgacaatgacgccagccacgccgcggttgcgccgctcgccgcgcccgccacgatgaatttatctatcccccaccggctcaattcgcgctgcgccagcgtcatggtttgcgacaaggccgccgtcatggggatcgccagcggcatcatcaagtattcatccgcatcgtccaggaacaatcgccagcctcgggcctggctatcctcccccgcacgacgccgcccctcattttgatattccaggtacggataaggcagccggttgacgacaatcacgacggtgtgactttccgccgccaaggccgccggcatggcgacggaaaacgccgcattttgcttgcctggcccgctcgcccctgcggcggcgcaagcgcagtcatcgctcatcagcaccaacgctttacgggcaagcgccccgttggggatataaatatccacatcgtgccaccattgcgtcggccggatggcgtcttgcggcgaccaggattgcgacatcaaccgataatgacgtatcgacacgtcatggccgttatccacgccctttaacgaatatgacagaggcaatatcgccaactgattgttataacaaggaataacggtgtgcaaggcggaatattcgtccgcaaagcagcgatcttcctctgccgccatggcctgccggccgccgattaaggccaggcaaatcagcgcgatgtatccgatgcgttttagcattttttcctcccccctttgtccgtggcaaatcccttttacgccgcctggcggcaggaaaccttccgcgcgcctagagcacctgatgaaagcgtatcggatagccaaagctgtccttttcgaacgccacgtccctgtcgttctcgcccagcaataggctgtaaacgccgttttcctcataacggctcatggcgatatacagcacgacctcccgatggtcagcgatcgtaaactgtttgcgcctggcgttgatttccaacgtaaacgccaccacaggattgttgttcagaaataccgaggtctgctgcatggagacgatcctgccctgcgctttctcggtcacctgaaagggcgtggcgtcattgggggcgcgtatatccaccttcttttggatatagataaagttaaacaccgccaacgccaccgccacgaacagattgatggtcatgatcaagatgattttattcgccatgaactccccctttgccgttcttccggctcccgacatgtgcgaggtaaaagtgcccttgcgggcacttttcattaagggccgggcttatgacgatttacggccaaacagctgcgagaaggcgctaatcccggcatcgatgacggcgccaatgccctcaccgagtttggcgccggcgcccgccgcatccgcgtggatcccgaatagaccggtaccggcatctacgatggcgccaatgccattgcccaggattttgccggcatcggaagcgatgcctgcgccggaaaccgccatgacttctgcttcagtcagttctttcatactgtctcctttgtatttatcgacatgtttagtaatgaaaaaatgaaaccctcactgtttgttcacctccttgttatctgctcacgaaagaccctgttgccaatgcgttcacccgcgcgacggtgacaatgtcagaacaggccgaactcacggcagagataatcggcaacgccattgcggctgttgggcaacgcaatcgggttaaacggcagggcgcgcttcaattcgcccatcgcattgcccatcaccacccccgttccggcccagcgcagcatgtccaaatcgttcatcgcatcgccgaaagagaggcaatcgcgcatcgctatctgtttggcgctcagatagtcggccacgcttctggccttggaaatatgcttatccatgatgtctatcgtttccgcagaggacttacagatggacagcgtttttccgaaagcctgactgacctcgtcgtaaaatcgctcgatcagcgccgcttcaccctgcagcagcactttcaggatcggttgccgtttcatcgcctccggctcgacatagcggcaagcgacgcccgaggttttgatatagtcggcaaaatgcggattctcttcggccatcatccatccttcctgggtgaacaacgtcacgtggagcggacaggcgaagaggtaatccatcaacatcatttgactgtcgcgaggcaggaaatagcttttatccgccaccggccgcccctcgatattgaccatcgcgccattgcaggagacgatcgccggcgagaaccccaagccatccacaatcccgcgcgcatccgcatcgcaacggcctgtcgcgatgacgatttccagcccgcgggcatgcagaatattgagcgtttccaccgtcagatcagacagattcccggcaggatccagcaaggttccgtcaagatcgctcacgatcgcccggtattttattttgccgtcgatagcaagccacatatcacgcctcctccgcctggataatcccgtcttcggcgcggatttcgctgtcgggcggaaggtgggcgatcgcgagcgcaatggcctgaaaacggcgccctaccgcaccgatggtctcctgagctatctcgtgagaatcataaaacagtgaaatggcgagccgttccgcttcggggaacaagcacagcaccgtctggtggttgctgccgctgacgatatccgtcacctggaacgtaaacggcaagcgcggatccttctgcggttgcggcatgttttcaaacacaaacaggctgccgaacggcgaagtgggcacccattgttcgtcgtagcggttcagttcggaaaaggcgtacttctgcctcagcgtctgggaatccgcgatatcggccagcaacgcataaatgggccggcggcgaatcgcctgcaggcgcagcaccgggctggcgacacacaggccaaacagcgtctgcacctgctcaatgtccgccgggcgctcgctcatggtcgtgccgatcgcgatatcgtcacaggccagcgcttcggccagcgccagcatccaggccagctgcgtcagttgattgaccgtgatcccctggcgccggcaaaacgcagtgaggcttgccacctgttccgcgctgaattccgcgccatattgccgcatgcgtcgcccctgcggcgcggcatccggcgaagcgctcaacggcaaacgttggttgaccggcgccccgcgcaaatagtccgcccagaacgcctgcgcctcgggatcgtcgccgtgcgcgcgcacataagcggcgaaaggctcaaatcggttaatttccagcgccggcgcgcccccttccagcaaggtgaggtagtcgttgaaccagtgttcgaacagaacgccgagggaccaaccgtcgaacaagatatggttaaaggtctgcaccagatagtgctcatcggcgttcaacttgatcaggcgccagcggatcaacggcggcgcatccagctcaaacgaggtttctcgttcccgggccaacagcgcttccatcctttcttccagcaaggacggcggcgcgtcggtccaatcctcgatcgcgatcggcgcctgcagcgtctcgcagatgaagacgttgggccgcccacggcgggtttgatcgccaaacccggcgcgcagcatttcaaatcgctgcagcgccagcgaccaggcctgattcaacacctccggctgcagcgggccggccacctcataaacggcctgatcgatctgatactcgcggttaagccggttgaaatacatcagttcccgctgcgtgaccgtagcctcgaaaacggcggcgatgcgatgacgttgctgccagcggtccaactcggcgaggctgacgttggcatgggggaagtcccccgggctggcgaggcgaacgccctggctcgcctcgtggcaacagtgtgcgaccagcgccgacaggctctcccgatagtgcgaaccgatccgggccagcgtcgcctgcggcaataagcccgacatcacgatgctcagccggtcgccgtgcacgtagagcaccagatccagcacattgtcgctcgccggcagcgcgccgttttccagatccgccgtttggtcgatcaaggcccacaaggcgtcgtcagtctgttcgttaaagaccccgagatagttgaatgcaatggccggcaagcggtggcgccgcaggcaggctatcgcttcgtcgtccgacgctgaaccgtatttcagcgccgaatagccgatgccgtgatccggcatctttcttaatgcgtccttgatggcgcgcagcgtgtgttttgggctctgatgcgcggtgatgcgcaaaggcagtaaggcggtgaaccagccgacggtgtcgtcgagctggatcttatcgtcattgatatcgcggccatggtgttcgagcgtcaggtaactgtccgcacggccatgccaggcctgcaacaccggcgccagcgccgccagcaacacatcgcgggtcgaggtgcggtaggcctgatgacagctgtccatcaacagcgtcgtcaacgccgcgtcgcactcgaagcggcaaaacgccggactctgcgccccctcgctgagcgtggcgtaatcgggttgcccggcgatcatcgccaaccagtaagcgcattggtcatgccggctcgccgcgtagtgccttaacgtctcgccccactgccggtagctggtgcctttcgccgacagcgattccccctgatgcaaccgtcgcatgtctctgacgatgatgcgccaggacaccacgtcgatgatcagatgatggaatgcgcagaacatcagcgcgtagccgggcgcgctgctgtcgaaaatgtagacgaagcggcacagcggcccttctactggatcaaaccccgattgccattgatgcagaagttcggcgcggctttggcgacaaagcgccaggtcatagtatccccatgaagggccgccgtcggccaccgacagatagcgctgcgcgaccagcgcgccggcgtcgtcggcgctaaaccgcgcgcgcagcatgtcatggcgcgacgccagcccgttcaccagatcggccacgcgctcggcggacatcggcggcacccgcaccaaaaaagtctggttgaagaaggcgcgatgttgcggcggctgctcgttgtaccagcgctgaatcggcagcaattcgaattcgccctgcagctcgccctgttcattgagcggcgcaatcgcctcccgttgctgcaaaatgcgcttggccagcgcccgcgcattccgggtttcgaacaccgcacgcgagttgctgtgatagcccgacttgctcaattcgctggtgaacacgatgctttggatcgaatcgccgcccaaacgaaagaagtcgtcatccacccctacccgttcaacgccgaggatctccgcccacagggcgcaaatcaacgcctccagcgcgttctgcggcgcggcatatcgctcgccttgcgcgaattgcggcgcgggcagcgccgtgcgatccagcttgccgttcaccgtcagcggtatctcgtcgagcgcgacatagctggacggcaccatgtaatccggcaggatccgctccagccgggcgcgcaaatcggcaggatccagcggctcgccccgcgccatcagcacataagcggcaaggcgcttgctatcgcgatggacgacatccaccacgacgcatttctcgacgccctccagcgcattgatcgtattttctatttcgctgagttcaattctgaaaccgcggatttttacctggcaatcgtttctgccgagatactccagattgccgtcgcgcaacgctcgcacccgatcgccgcttttatacaagcgtcgcccgttcagcgtaatgaaacgctcttgcgtctgctgcggctggttgagatagccgcgcgccagcgcgtctccgccgatatacagctcgccggccagccctggcggcaacggctgcagccagcgatccagcacatgaagttcgcgccccggaatggctcgcccaatcgggatgctgctgcgggtttcgtccgccgcgatggcgtacatcgtggtgaacgtggtgcattccgtcgggccatagccattgatgacctgctgcgggcggttggcttgccgcaccaggcgctgcatcagcgtggcggtcagcgcctccccgcccaccagcagacagcgcagcccggcgaacaggtcggggtgactgaggtaaagatgatcgaacaggctgcgcgtcgcccacagaatcgatacctgctgccgacgcagcagggcttccagctgcggcacatcgccggcgatatcctccgtgtcgcgcacgacgaccaatttggcgccgttgagcaatgcgccccacacctcgaacgtcgccgcatcgaacgccgggctcgagaggaagagcaacgcgtcatcgggcgtgacagcgatgccggacgcggtcgccaacccgcacatcgcgtgttgctcgagcatcacgcctttcggggtccccgtcgatcccgaggtatagatcaccgcgccgagccggtcggcgccggtgacggccggcagattctgccgctcgtgcggcaggcggttcagatcgcccagcgtgaggacggacacggcgtgcggcatcatcgccgccagcgcctcggcgaccgattgcaggctttccccggcgatgagcaccggcgcgcgcgtttcttcgagaatatgccgaatgcgcgcctgaggataattgcaggagagcggcacataggccgcaccggttttcagcaccgccagcagcgccaccaccatttccaggcttttctcgctgtacagcgcaatcagcgtgtccgcctggggagcgcccccggtcagcgcttggtagcggagcgtaatttcgcgcgccaggctattcgccatgccgttcagctcacggtagctgacatacagcccctcaaactccagcgcaatcttatccggataacgcagggcgatcgcctcaaaccgggcgctgagggtttctctcggcaacgcgggggccgcgtcgtcatctggcggcatgtcggcggcgggataaaaggcgaggtggcgtaaaggcgcgtcaggcgcgcgcatcgccgcttgcatcaagcgcatgaaatgttccgcgcagtcgcgcatatcttcttcgtcaaacatgtcctgacgaaaacgcagccggaactgcaaggcatcgctgtcggcccgatcctcatattccagggaaagcgacgcgctggccatatcgtggttggcttcaaacagcggcgaagtggcgcaatcggccagcgccaaggccgcatcgcgcaggttggtctgggcaaaggaaatcggcagcgcgcggatccccagcgcctgcaccacctgttgcgtgggcagttgattaaaccgttggcgcgagtgcggcaccgcggcggtaataaacgccagcgcgcgttgataaacggcggcgaagccttcgccgtcacgcagcgagaggggcatcacgctggtgtttacatgtccgccaagcgcaaatctttgccctttttttatcgacaccggatagctgatatagaccgtttcctgattgccgctgcgcgccatcaagatgccccacagcaccagcaacgccagaaagtcattcattcgccgtattcccgcgccctgcttcagcgctttccattgcgctttgggcacctggaaacgcagctcggccgcctcatcgcttcgcacggcgccgcttttctcaaagggcacgtctatcgcgcccaaatttgccgcttcggcccgccagtgcgccagcgctccgtcggcggccagttgttccacctcgcgctgcagctgccggttgatggcggcaatctcggccgcctcgaggcgtgtcgataaccgctgttgaccatagtactggctcaccaatgagaaaaactcgtcggaagacgcgccgtcgatcaccagatgatggcccaccagcgccagggtatagcgccccgccccctcggcgaaaagcgcccaacgataaagcggcccgcggtaaatgtcgaagggctggcgaatcacttgggtcagcagcgtgcggtccgtgtaatgctgcaaaggatggattgcgtcattgcgacgccaatacagctcgccattctgttcatgaatatggctgttcagcaggacatgatcttgcaccagcgtattcagcgcagcttgtaatctgatgggatccagcgcgccctcaatacgctgcagcaccaatacattgtaattacagccctctggatggcggtcatattcatcgataaaaacttttgaatagggtgatacaggaatctcttccatgacaaacactccatttagaatacacgtgccctgcttaacggcgatccatgcggcatacccaaacctctttcggcatcagctcgcttatcttttctgagtaataaccgatcagcatgttgatgcgcttttctgcaatgacctccgccgcctgagcgcaaatcgacttgtaaaaaccaatagggatcatcactttgcaacggctatgcaggtgccgacaaacgccgatggcccaggaaaaacactccctggaaggattggaaatatccaaaagttcggcacactcactggaacagccaatcacagcgtagagattgcctttattgatataatgaattttatgataaagaggatgtttttcaatatattcaaatgcgcgatgatctttttctcgccccagattattgataaaactggcctgccgcgcttggccgccctcggtaaaacgaaaggccataaacttatcaggctttaaggttaattcgacgaagggatagatttgcgtattggtggttaaatactttctgaaaatcttttcataaaccctgatcttcctgtcatcggaaaagcagatatccgccgccacatccgaacgcttagcctgcaggaaaaaatctttcaagacggtggaagatttgacctgacggtggatcccaagatcgccaagcatattgacgttaaaagacaatttattgattttaaaaggataaaaactggatacaaacatcccgagataacgttcttgatccttgtaaaatatgcccgttttttccatcggcgccccacaatgcggatcgagcaaatgcttccagtgcaggaaacgctccccgcccaaatctctgccataaagttcctgcaataatttgaaatgattatgagaaaccgcttccctcacaaagacagccatgttttatctccctataaaaccgattccatgccgggcggaaatcaataaaagatgaccgctcagcgccgcttataatacggcgccggaccgttcgcttcctttccctgattaacaagagtcgctgtgcatttttaaccagcgcaagaattcaatattattatcgatgttcagttttctcatggccgaacgtttatgaatactcaccgttttcgggctgatgccgagcaacatcgccgtttggttttgtgaatagcccaaatggatcaaacggcacactttcccctcgctaaaggtcaactgggtacggcaacgcgggcaatagcttgaaaccaaactatttttcttgcgatagcagaacatgaccttgtccacgatcgccgccacgctgtctttgcgcgtaatacttccggcttccaaattgcaatgaattttagggaatgtctttttatgctccaatattgaaaaatagagcggaatagaagaaaagttgccctgcaaaagctgggtatggcaaaaatttatggacacccgcttgtccggcgccctgaatatgatgttggcacgttcttctcccgtgatcttggccttaatgccattcgtgagaaaaccttcttgcaaggcaagactcaaccccagcttgaagaattgatttttatccacaatagcgatattgacgcgctccattaacaaacctcccttttgactacgcttgctcactctccttactgcaatatcattgctgtgattattttttgttttaacgtgctttttaataaaaaagcgttataggcgaagcaaaaaaagccatgcctcgcaaaggtgcattttatatatagggttatataaatcatctgccctggagagcatacaaaagcaagacgcggtaagctgccgcgcttcgcaagggaaattgttatcgtaagatatatttataaggcatcattgccatcagcatcacggtgctaagatttttctctgatacgttaattttactccaagagcgcaatatatccagataaatatcgaaaaaacacataatatagaacataacattgcgcggcattgattgttaagagaatccgtttatgcattaggaatttacttatgataaaggcaggataatgcttttttcgcccgtggcggcgggatcatcgcagaccctattaaacagagtataaccatattcattttattgtaaaaaaattgcataaaaaaaagctacactttatggcagtaagtgattcccgccctttcatgtagacggcaacaaaaaagaagaaggcgaacccatcggccgcccacgcaagaaacgccaggtaggattaaagatttttcaggagtgatgcgcagcgcagagagataacgcggcatcgttgacgagcaggatgaattatatttttttgatcctcatcagctttttggcctccaggcaggaaaccaatccgaggtgatctttttttagctgcttgtcgctcccaagaggaagaatgactttgaacgtttgcaacttaccgtgattattatagatatcaaagactatcaccggcgggccataacccaggatcatgcagtctaaaaaccgcaaaacggcgcaccccaagcggctcctggcctcgcggataattttatccgcaagctcatcataccggaaaggtctttccggcgtcgtcaataccttcataaggtctcccttctggtatatatcattccgatttaaaataataacctcataaaaccgccgccgttcaaggcgagtgagacataataatccagacttcatcaatatataatctaacgatgcaaaatcaatctaacaaaaaacacaatagtataaaaaaacagcgcgagttttattgaaaaaatgacctgatttgcaataattaaatggcctgaagtaaagggctaactgaaaaaggagtttcaatcatgaaagaactatccgcagtagaaattgaacaagttaacggtgctggtttttttggtgacgtaggcacactgattggcagtgcggtaggtacaggtattgataccatttccgcgattgccggtgttaacccggatgccaaaaccgttgtcggcaccatcggtaaaggtattggtctggctgtcgatgcgctgatttccagcggattgcagatcatctctaaactgtaataacaactcataatcatcccttcctattttttaattcgcttcattttaagcaccttcgcgggtgcttttttttacttcaaagaatcaaaaaatagataaggtcagaaaaaccaatatccaaaaaaacaagctgggtatcaccatgataaaaaaacccatgcgtttattggcgtttttgagcatccagtcatagatcatcgcaccactccttgtgaatgccgggaggcatttccgcctcccggtattttatccatcaagtttttgattacagtttcggcactttggaaaagaagtccgccatttcgtgcgggaaccctttcgcaatcgccggacgaagatcgtccatggaaacattaaaatctttcggctgctcgcccgtttgcattttttggtgtgcgttcacattcgattgcagaccattaaaaatgcccttcatattgccgaacatatcatcgcaagattttgtcacattactcatgaccgacttggccgcatccggccccgacatttgaatattgctgacgccttgcataaacggttgactcagcgacgattgggagttggtgcccaaattgccgccggccttcatggtttctaaaattttggctggatctaacatgtttatcacctctttacggttgtgtttacatcgctttcgggcacgagaatcctcgcaacgcccgtgaccaaagtgggaaatctttcatcgtcgagcgcaattccagtttgagcacgcccaccaccgacgacatcgacatcgtcagctctcgcctgtcgctggcgagcggcacgggattgctggcgtcgaacatccggaacaaggcccagggcccgtcgaaactggcgacctggatctggccggtgccggtgcggaaggtgagtcgaacatagctgccgcctttcgggcccggccaatcgatacgggtaggctggctgaagccatggctgtagttaatcacctgcccatcgatatccagggtcgcttccgtaatagtcggcgtcagggacaacggcctgatgaacatggagaaagacagcttgtcgccggcggtgaagaaggtatcgcggatcaggcgggcattttcaaacgcgcccagcgtgctggcattgacgatcccctctgaacccggtttggcattccatttctgcgcgttgacgtccacataaggggccaggttctcatcgaagaactgctgcatcgcgccgctttggccaaacatgcgcgagaagtcctcgatgccgacctccgctctggcgttgcgcgagaacggataacgcccgctgatgctgctcttgcacaagccggaggccagcgacgaagcgcctttgctcaggttcttctggctctgctgaatcgtctggctgtccccgacctgcaacagatccatcatcacgctgcgcaccggttccggctggcgcgccgcatccagctgcaggcgcttcagcgtgcccccggcgggcaccacctggccgccgcgcagcgaggtggacaaggtggtcaactggctgtacagcgcttcgaaactgcggctcagcggatcgttgctggcgttggtggtctgcaacagctgatagcccagacggcgcagcagctcgaagcgatcttccaccgcgcgctccggcgtgagacgaaaacgcgcgcgctcgccggaaatctcgcccagaatgtcgcgccgctgctgctcgatgcggttgcgctggcgatcgaaccagcttgccgcatcgccctggttggtgccggtcatgctggtttcgcgcgcggcgaaacgcaccagattggccagtggagaagaaggatcggacagttgacgcgccaggatcgccgcatcctcaagcccgttgaccggccgggcgcgcacgtcgcgcatgaacgcatcccatttgtcggcatactcgatgaggtaaagcttcctcgcctcgtcggccagcttctgcgccgaggccagcgagttcaccgcgtttttcccttccccactgtcgcgcagcacccaggactcttcttcgatcatgtccttggcggcgtcatcgagctgcgccaggaaaacgtcgcgatagctggcgcgggtatagaaccccggcacggcggtatcggtgaccgtcgcctggctcttgcggcgcagcatcaaggagacgttcggtccggcggcgtcggccaacgaaatatcgttgatcgccgccggcagcggtttctcttcgatgcggcgcaccacccgcacctgcatcggaatgttcatcgctttcacccgcgccaggcgcagcagatcgccgttcatcttcatgaccggcgcgtccggcaaagagaacatctcccgcagatggtaagcgaagatgcctttgttcatatcggtgtacccctgcggcataaaggtttcccagcgcgccatgaaccagtcgaccaaggcttcggcggagcgatgcgaaggttcgcccatcatcaggtacactttcagggtgccgtagacgtccttgttggacgccgagacgtcattcttgagttcgtccgcgatatagttttccaccgccggccagaagatctgcagcaaatggcgttggtaggttttttgcgccgcgctgttgatcagcttgtgctcgaaatagggattcggcaccggcgacacttcgccgcccaattgcgcgttcatgtagcccagctgctcataggcggaaatgacatcgtcgctgacgcggttagtcaccggaatttcccgcacgatgcgttttgtctcatcgaagcgcgccgcaatgtaggagatgtaatcgctctcccacaggtaacgcatcgccagcagattaaacgagaccgccaacagaatgagcaccagcacatagcggcccagggagctcatgcggctgccgagcggcctggcgtgcgaagactgctgcatcaccccgcgttcttgccgggcgtaatccagctccgggtgataaatgcgcccggtcgggcgagcttcatagatatccgccgcttccgcgttgtagatcgccccctgcggcgacaaggcgatggtgctgcccagccacacctgctgcagatggcaggcgtagcccaccggcgtttgcgggaagatctgctctaacagggaatacagcgggttgcccagcgaccccagcgactcggtgaagaacagcagctgctggcggttttggccgtccggcgcatcgtgcaacagttcgagcacgtgatggctgacgcgcgccaccatctcccggtagagggtttcatactgttcgaagggggtttctccctgttcggcgcggttcaggctgaagcccatacctttttgcaacagatcgtcgcccagcatcgacaggaaggtctcgccgccgaccagttgatcgaggtggctgatggtaagatagaccggcagctcgctgcggaaccacgaggccatctccagcaggcgcacgcgcagcgcgtcggcgaccgactttctctccgtcagcgaggcgtgcagcaaccaacgcgcatcaagacacagcatgatgccgtcgatgcccggatggcggcgatggcggcggatcagtttgaacagggtgtcgcgcgccctggcgccctcttcccccagaccgttcaactgcagccattcgccggaagtgtcgacatacaccgaattctccgccagccaccagttgcaatcctgggtcggcccgacgtccaccgtctgctgcaggccatagtgctcggccagcaagaagcgttcgccgctttcgccgatcagcgaggttttgccgctgcccggcggcccgatgaccagaaaccacggcttttcgctgacgtaacggcgcgtcaggcggtatttgaagcgctgccagggggtgcgctgcttcgccgtgccgacgtactgcaaggtgcgcaaagcgtcgtaaaagcgcgaggtcacgcgatctcgctgggcggtcttgcgtttggccggggccggcgctcgcgcgtggcggaacacccaggataagaacgtcgccacgaacggccacagcgcccagcacaggatcagcgcgatgatgatgcccctgacccagaccgacagcagcggccgataggtgccgatggcgatcaacgtcccaatccaccacaccaccgcacacagcagcaaggcaatcaccaatatgaatgatctacgtatcatataatttccttattatctctacgccggcggatgtcttagttatcctcggggacctcggcggctacccctgcctgatttaacgttgcagacggtgaagccatctccctctcgccgattttccaaaggatgtccacgcggcggttgcggcggcgcccttcttccgtcgcgttgtcgtccagcggctcctgatcgcccttgccgaccgaggtcacggtgcggttgtatttactgttggccaaggattcgcgcagcttgtcggccaccgtctgcgcgcgcgcctcggacagtttcaggttggagttgttggaggtgttgcgatacggtttgttgtcggtatgcccgatgacctccagatcgcccggccacggcgccagcgcctcccccaaacgctcgatgttgcgtttctttttaaactcttccgacagcttcgactgcccggtggcgaatgcaccgtcagaggtgaagatcaacagccagccgcgcggatcggcgcgcacctccagccacccttcgctgaggatttgcggcagcggctgcggcagcgtctccatgatgttgattttgcgcggctgcggcggtgtccaggccaaaatggcgttgcgcagcgcgcgggactgatcgtgcagataccaggcggccgaggcatacgccagcagcgcgatggccaggccgtagcacagcagcttcagcggcgtgatgcgggtcgccttgcgcaccactttgctcggctcggcatcggccagcgtctgcgtcgggttctggctgtacagatagccgtcaagacggttgcgcacatcggccaacagcacagcgccgcgttccatcacgtggtattgcccttcgaagcccagcgacaggatcagatcgtaaaacgccaggatctccttgttgcgcggcgaggcggccagataggcctgcaggtgctcgaagcacttttccccgccccaggcgtcgcgataaaactccaccagcaggctgagattcagttcgccggattcgagcgtgctcatgcagcactcatccacgtaggagcacagcagataggccagcttgtccacatcgctcggcgcgatgtgatccgccagtagcgtctgctgaaattgttggatctcacgcacgatctgcgcgcgcaccgcgcccggattcagctgtttctgatcgcgcacccgctccacctgcagcagaaccgggatggcggcggcgatcaacgggttgtcccaatggcccatcatcacaccgggcttgctcagcgcggcgcggccgaacagcccgctcgaggtcggcgccgcctcggccgggcgctcgcccggcgcgggctcgctgctttccggcgcaacgctttccgcttcataaggcttgggttcggggggcgtcgccaccccggcgcttcccggccgcagcttggcggccagcgcccgcgcgccgaaggacagcgcggcgatctccgccgtcgttttgcccaccgagccggacgcgggaaggcgcggcgtcgcgttgttgcgcgttaccgccatcgcctcgcgtatttttctctcgaattcgttcatcccaccctcccttgccttaatccccagacgtcaaaacgcaggtcggggaaatcacccacgatgctgagcgccatcgccgagccggccatcatttccttataaatcgggtcggcatgatcaacctcgaaatagatgctgttcgggtaatacggtatgtgccgcggcggcgaagccatcggcaacaagcgagcgcccggcaattgcagatcgatcagctgaatgattttctcgaccggccccagtttgacctgcgcggggaaatacgagcgcagatgctcgatggacaaaccgcagctgacggcgaacaccagtttttccaggcgcagctgcgagtcgttcgggcacagataaatgctgtcgccgcgatcgacaaacggcaacgccaccgccggcgcttcgatcaccagcgacagcgcgcggcgaatcgaggcgaagagctggaagtagcagttgtgcggctcatcgtgcagatacaccaaatcggcccgatcccagaggcgttcgccgccgggaatgatgctgagccgccccagcaggctcagcaacgtgtcgaacagggtttcaggatgcacctgcgggctggccagcagttggctgatgcgcaaattgaactcgctcaaggtttgcagcaacagcaactccagcagctcggaaagcccgccgatcgtcatatgcacgtccgggcggaaaaccgactccagacgctggctgatcagcccaagcaattcggtggtgaaagcgggcagccagccgatggcgcggaaatccagcatcggcggcaaggcgcgctcatccagcagcacccgacgatcgctggtcagctcgcgcacgaaaccgaccggcagcacgctttccgcgctgctgaccgcgtcctccaggcttagccgcgtcaccaggctgcccagttgcatcgtgcacacgcgcggggtcccttccaggctgacgccgtggttgcgatccggcacctcggcgtccatggtgcgaaaacggctgctttttcgcgcatcctggataagatcgatctgggcgttgccggcgatgtccatcagcacggacaggcacaccactttcccctggcagccttctcccagcaccagcggcggcggcagcggtatatcctcaggcatgctgaacgccgtgccgtcggggaaaacgcccttggctttcttcagcgcaaacttgccctgttccaatagcccgttgtcgatctccagcgtcaggaacccccaggtgaaggtttcgacgctgcgcaagcgcgcttcaatcaagtgctcgaaaaaacgttcctgctgctggaaatgctgcggttccatcaacatgccttctacccaggcgacgcgttgtttaggtaacatgtcattcatccattttgtcgttagtcactatgctgagtgacgtcatccccaccatcaccttcatttgcgaatcagcctgcgcaggggacttttgctcggcgagcggcaacacgccgctgatttgctgaaactccgccccgacgacgacccatcgctcttgccccgccggcacctcgaagcgataacgcaacgtctccctcggttgcaaaatgctctggtgccggctcagcgccccttccgacggcgccgtctcgcggcaaggagcaccgtcgccaatcccctcgggcatccaccccgagcgattggtttctatcacgcacaccttgaccggctgcgcctccccggcggcattcgggttcacgttgtcgttggcggtcacctcgacgtcgataaaccgcaaccggcgccccgcatccgcagcctcatcatgagaaaaccagctgcatccgccgagcatccccaccgccaacagtccccctgtcgccatcccccggagcgttttcaccatgctaaactcctatgcattaacgaaacatttggtctggctgggcgcgacctgagtggcaaccatgttgttattgttcgtcgtgctggaatcgcctagccgcgtgaccggcatgccgccggtgaaatacttgcccgatccctgcaccggctgcatctgggccgaatgcgtcccggaggcggcgccgatcaccccgcccgaatcgacggtggccgcgcgaatgctgccgaggttctgttcattgccgccgcaaaggaaacagttaggcacgttcggtatgccggtgttgttgggcgcagtgttcgggcccggcaccggtatcatcgggtcacagccggcaaagctgatcccggccatgttgttattggctgcagtcatggtggtttaccccatatgtatctggccgccgtcgatcttcagcaccgccgaagacttcagagaaccaatttcactgttgatgacgagggattgccgcgcatcctgaatgatgtgcttcgccagcacctcgtcggtttcctccacccgccggctcgcgtgcttgctgcgcacaaacaggcgttgagagatttggtgcagcgtttcggccacccaacggctgctgcgcgtcagcagcgtgaagtgcgggctgcgcagcgtcagccgcttgccgccctgcagctcgatctccggcgccacgatgcgcaagttggcgcagcggctgtccagcgtcatgacggcgttcgcctgttgccgcgacaagatctcggtaatgaccaacttgtcgccgtcggcgatgacgcaaacgcgatcgcccgccagcggctgaaccaagcagctggtggcgaccgccagacaatgggcgcgcatgccgtcgacatacagactgccgttggcgtcggccgccagcgtcaccaccttgcgccccccttgttcgggaagcggagcgctgcgcaccaactgcaaaggcgtcaccctggcgttggcatagaccttctgatgctctcttctggatttatacatatctgcttactcctgttggccgttgatacgacggttgccgcggccccggttgttgatgcgcataccaggcgtcgatcgcactcaagaacggatcggcggtaagcggcacgttttcggcgcgatgacgctgcgcgccatgcaggcgagcactctgttgctgagcggcggtcaacggctgttcgatcaggttcgcttcccgcagttcggcctgctcaagattggctaacgccagatcgcacgccctgaattccgcttgcggcaagatggcgcgcccccagttggcgccgcccatcgcgcattcgctgaaccgggccttctgcccctgcgccagggtcagcgtcgcgcgttcgaaatcgcagcgctgtacctgcgcttcggcgaagatcgccgaggtcagatcgctgtcggcgaacgaacacccctccagctcgctgcggtgaaaactggcgccctgcagctgtagctgcgccaaagtgcagcccgacaggcggcaggtgaaccagatgcgcgcctgccccgcgatcgtctgccagctgcacgtctccagctgacaactgcccatcacctgacgatccagggtcgacgcctgccacaggcactgcgtgagttggcaggcgtaccagttggcgtcctgtatcacgtcctggtgaaacatcaggttggtcagggtgctggactgcaccgccagatgccccaggctgctgcgttcaatttccgcgccgttgacctcgcaccggatcaaaccgcagtcatccagcagacaatcgccgacgtaacacccctgcagcgcggtgtcgttacacgccaaattgcacagcagcccctgttgcagcgtcaggttgtcaaaccggcattcgttgaacgacaggcgcatcaggctgccaccgaccacgttgacctgctgcagggtgcagccctcaaagcgcaccgcccgcaaatcacagccttcaaacgtgacgcgttcgaaatgacagtcgatgaaaaagcagtcgctcagcgtcaaccctttcagctcgcgatcgtggaaccggcgtttcttgaagatccgcggcatgggcggcgtctgcgccaccgcctgggcgacctccagttcgatcgcctctcggtcaggcagcgcctgttgaatcacgcggctttcagttttcatgcgcatagtccccatgaatgattctgcgcggcacccaacacgcacgctccagcagacaaccgctgaaccgcgtgccggcgtcctgccaggtcatcgccagatgcgccgccgccagattgcactggtcaaatgccgcatcgcgcagatcggcgttataaaacaggccttgctgagcgctgctgttttgccaacgtgagtgcgtcaacaggctgtctttaaaccgcacgccggccagatcgcagccggcgatcgcgcaggccgtcagatcggcctcgtcaaagttgcattcagtgaaaacgctgtactgcagttggcacctctccatacgcgccgctttcaatcccactttggtgaaacagctatcgctgaacacggcgtgggaaaagttcgcctgcatgcccgccgtcaggctctcgacacggcagcgttcgaaccgcacgccgcgccagttgccgccaaggaacgagtttttggtgagcgtcatctccagcgcaaccgcctcttcggcgaggcagcggttaaacacgcacgcgtccagctcgccttgcagaaactgcgcgcggatcagcgttgcgccattaaacatgccgttgccgatcgccgcgtgttcaaagcggctcgcggtgaaatcgccccgctcgaaaacgcagttatccagcttcacgtggtcggcgcgcaggccttgcccctgaggctccgccagcgtcacccgttcgaagaccgcctcttgccacacgctttccgccagcaacggcttttgcagcgtgcacgagatcatgcggatctggcgcagcgccgcctgcgtcaggttgaccccatcaaaaacgcagttttcgaaggtgcagttctcaaaagaagcctgcgagaaatcgcagcgctcaaagcggcactgcagaaaatgcctgcccgacagcgcctcgcagcgcaaaccgctgaaggtctttccttccacggtcgcgctatcggggaaaaacgcgtcattgccgtcttcggcgggaagatccggcaaatcgggcagcgtcacggaagccggctccgccgacgtttgttgctggtgcaaggcgatcgcctcgcggatgcgtcgatagaacacggcggaatcgcccagagaggtgggcgacggatcgtaacgcaagtcgctggggtgatccgacaccgcctggatgacgttcaaccccatctccgccggcatcagatccggatcaaacagaaactcaaagggcgaggcgtcatcgtcgctgcgcttgcggaatacctgttggaaatagtcgaacgagcgcggcgcatcgcagcgatccaacgccagcatgacggactcgatggactcgtccagcagatgcgtcaacggcgcattgccggtgaagataagcaaagcgatgtcgctgtcgggcaggaaccacagcgttttgcgctgcagctcgatttcctcgaggctgtcgctatcgtgacggcggatgaacgcccgtccgcgcaccgccggcagctcgccgcgaatcgcctcgctttgcgcgccgacgccctgcagctcgaagggcacccgatccggccacgccgcttccggcaaccactgcgccggcggcgccatctggaaataacgccgatcgatattggccggcagcccggggaataccgtctcgagataggctttgccggcgatctggcccgccaccttatcgatgtgcgccttgcgcagcgcaaactcgtgcggcaccggcgccggcgccgccagcggagagcgctcctgcgcggtcccctcggcggacagcgtcatcagcagcggccgcagcccgtcattgcagccgcggccaaacgggttctccttgttgtctttgccgccccaggtggaggtgtgatccagcggcacgctgaggaagggttccacctccatcgcgccgcgccgtccctcgccctcgacccgccaacggcgcttcagcccgccgatgtcggcgctgacattcagcgttttcaccggctgaccgatgccggcatggccggcgatcaggtattcggcgaacggcttcggctcggcaacatccaatatcggcaggctgagcggcacgcgcttccacgcctcccagatttcggcttcgttcacgaagtgttcaggccgggacaggtagcatccggccacgacgctgatgccgagccggctgtctgtcccgatctggtaacttcctttaatcgccaccaattgctgtggccgtatgattctcattgccgcgcctcgttagtttttgctttgcatcccgacttttttcaaatcgacgccggtctcggacagtgacgcgccggtatagctgatcgacacccctgtcgtgctggtgctgctgccggtattgctgacgctgctgccggtgttgctgacgctgctgccggtgctgctgacgctgctgccggtggtgccgacgctgctgccggtggtgctcacgctgctgccggtggtgctgatgctgcagccggtggtgctggtcgacgatccggtggtgctgatgctgcagccggtggtgctggtcgacgatccggtggtgctgacgctgacgccggtaaagctggtgctgctgccggtctggctggtgctgaccgtggtgtagctgttgctttcgccggtcatgctgttgctgatgctggtgaaggagttgctttcgccggtcatcgagtttgatacgccggtgcagctggtgctctgcccggtgaacgaggtgctcagcccggtgaacgaagtgctgacgccggtaaatgacgtgctcacgccggtgaacgaggtgctgacgccggtgaacgaggtgctcacgccggtggcggtgaggctgacgccggtcatcgacgcgctgacgcctttaatcgaggcgtcaaacccggtaatgctgaagacgtaatccttgtaagagacgtggttggtgaaccagtccgtaaaggtgcggcggatgatgtcgaacttgtccattcccacctcggtggcctggttgcgctccaccgtggtttgcagatcgcgttcggcatgcagcatgacgcgttcgttgttgcggttgtcatcgaaggtcaactggctggcatgctgcggcttgccgaagcgcagcgaacgcgacaccatgcccgagtagttgatgtattcaggtaactgataaggcggcgggttgtcgccgttatacacaatcccggtcaccatcggacgatcgagatcgccgtcgacataggtcaccagcacttcctggccgacgcgcggcatggcgatcacgccccagcctttccccgcccaggcctgcaccacgcggatccagcaagagctgtcttcctcggtggttttgtagcgatcccagtggaaatgcacgcggatgcgcgcaaatttgtcggtatgcacttcggagttgggcgcgccgaccacggtggcgctctggatgcccggcatctgcggttttggcgtttcgcgcagcgggcggaacggcacgtcgtcgttcaacgcattgaaacggcaggtgacgttgcggccgtcgctgctgctgtccgggccgtcttgcacgaacacatagtcgcaacgggtcagcttgaagcggcggttgcggttggcgtccgggtgcaaaatcaaggagaaatccttgccggccatcagcccgacggcgttgctctcgccaaacagcagatggccgtcgctttgcatttcttccaggcgcagccgcgccaggttttcaccgcgttcggtatccacataacccgccgcgtagtcgtaccactccagcggggtgttctgcaggccgaggcggctctcttccaccttggtttgcaggttcttgcgcgggttctggaagtcaaagtcgcgcagcacgatttcattcgggcgcactttgcgggagcgctggatgcgctggatcccttcgcggatggcgcggttttcttcgctgtccggcatgaacggcaacacggcgtaaccgaaatccagatcgtcgaaattctgccggtcggtgatcaccagcgtgtgtttatcctcggcgtgatcgaagtaataccagatgccttcgtcttccagcaggcggctgataaacgcgaaatccgtttcggaaaactgcacgcaatattcacgcgtcggataagtgccttgaatatccagacggtagtcggcaaaaccgtagcgcgagaagatttgctcgatgatgtcgagcacgttcaaatcctggaaaatgcggctgttgcggttttgcatcaaaaaccacagccaggtgctcagctccagcttataaacgaacttatcctgatgctgccccgaatcggaggcgccgatcacgtaagcgtaaaacggccgcgcgccgaaatccggcctttctatttgaatgctgatcccttgacccagcagagattcataatcaacgtccgcctgttcacattcgaattcgagcgtatattgcgagttgctcgacaacccttctttggtggtgaagctgagtggaaacgcatttaattcggctaacaccgggttatcaatttcgattaaaggcataacaacctctctgatccgatatcgaaccccgccccgcgtttacgggccggcggcaaattaaaaatcagtcgaaataaacacttaaactatcgttctcgaccatgagttggatattctgcagttcctgtcccgtccgtttgcgctgcagcacttcattgctgatgggcggcaaaatcgcctgctgcagcagcgactcgaccgctctgccgcgcgaaggatgggcgctgatgcgtttggctatccagcctggaatgtcgccttccagcaccagcgacacgcccacttctttgtgcaaacgctgttgtaaacgcgaaatctgtttggtggcgatatgggttatcgcttcggtagaaagcggcacgtagggaatgacgttcatgcgcgccaacagcgccgccgggaagaagcgcgccagcacgtcgtgcagcatcggccgcagcgcttcggttttcagatccggcgtttccgccagcgtcgcttctatttcgccggcgccgatattgctcgtcattaaaatgaaacactggcggaagctgatcatgcggccctcaccgtcttccatcacgcccttgtcgaagacttgataaaacgcctcgtggatatcgggatgcgccttgtcgaattcgtcgagcaagacgatggaataaggtttgcggcgcaccgcctcggtcaacttgccgcccttgccgtagccgacatagcccggtggcgcccctttcagggtggaaacggtatgcgattcctgaaactcgctcatattgaagacgatcaggttgtgcgcgccgccgtacatcgcctccgccagcgcaaacgcggtctccgttttgccgacgccactcgggccggacagcatgaaaacgcccaatggccgatcgtgcgcctgaatgccggcgcgggagatgcgcaccgcctgcgcgatttcatcgatcgccgtctgctggccgaatatctggcggctcagcagttgattgagattgagcgcattgtccagatcgctttgcagcatgcggccggtggggatgccggtccaatccgacaacacctccgccacgacgcggtcatccacccacggatacaccaacggcaggccgccgtcttgcaaggctcccagttcggaggccaactgcggcaagcgctccggcgactgccgctccgcgtcgagcaaggtggtgaccgcctgttgctcctgcgcctgccgctgacgcagcgcagccagttcgccttccatatcgctgagggtctgctgcaattcagtgatgcggctgagcgccagatcgtcgaatttgctttcctcctgcaggccgttcatttcggtgcgcttcaccgccaacccggcctcgagcgactcgattttttcaggcagcgcatgctggctcagcgccacccgcgcgcaggcggtgtccagcaagctgatggctttgtccggcagttgccgcgacggcagatggcgcagcgacaaatgcaccgccgcctgcagcgccgactcgcggatcttgacgctgtggtgctgcgcaaaatgcggggcgatggcgcgcatcatgttcaccgcattctcttcgtcgggttcagaaaccaacacgtactggaaacggcgcgtcagcgcggcgtccggctcgatgaactgtttgtattccgaccaggtcgtcgccgccaccatgcgcagcgcccccctggccagcatcggtttcaacaggttgacggcgtcgccggtgccggcctgcccgccggcgcccaccagcgtatgcgcctcgtcgcaaaacaggatcaccggcaccgccgaatgcgcgatggcgtcgatcagcgctttcaggcgcgattcgaattcgcccctcatgctcgccccggcctgcatgcgccccagatccaaagacagcagccgggcgccctgcagcagcggcggcacctgcccctgggctatcttgcaggccagcgcttccgccaccgccgttttgccgaccccggcttcgcccaccaaaatcgggttgttctgccggcgacgcagcaagatgtcgatcacctggcgcagctccgcttcgcggccaatcaccgggtcgatttcaccgtcgcgcgcctggcgggtcagatcggcgcaccatttatcgagaatatcgaccgtctcggacgcctccggcgcatcgccgtgggcgctgtagacctcttcttcctcttcctcatgctcgacggactccgccagaatcgccggataatcgtcgaacagctgcgggatcggcagttttttgaactcgtcgctcagccggtacaggctgcgctgcaacgtgggatcctgcagaatgccgaccaggatatgaatggtgcgcaccccgccggacggcgtttcggcgagctggctcatcagcagccctctttccaccaccgtttccagttgcgtcgacagatccaccaccgcattcgtgcggttcggcaaggtatgaagaatgcgatccaacgcatcgctgatgcgctgactgttgatggcgtagtgcgccaggatcagcggcaggtcgccgcgctccttgtccaccaggactttcagccagtgttccagctccacgtattcgtgcctgaaggttcggcacagcttggtcgcttcgacgaacgactgataggcaaagtggcccaatcgcgaaaaaagacgttctcgttgatacaccttaaatttccttatattaagttgttgattgataaaccagctgcctaaacgtccctgtcttaggtttcagccagctgtctttactcagcgacttgccgcccagctgcgccgccatgcccggctccgtggcgatcagcaggctgacatccagcatcaactgatggctcgtaaagtcatgacagatgctcaccagcgcctgcagccgccggctgccgcgctgatactgctgatactgcggggcccccagcgggccgatctgaatatgcgcgccgtactgggcatcgaaaaagcggctgccgatgcgcgtgctgcccaacttgcccagcttttggctgccgctttgcttgccgtcgtcgatccacttggcgtagcgcggcgtaatcgtgatgggaacggcgaaataggccgccaacatcttgttgagctgccgcagcgagcggcgaccgggcagataagtgccggggtacgcctcgcgcaggcgctggatatgcgggttcaccgtcagcgccgtatcgacgcccaccgtctggcgcaaatggcgcaagaacgggtttttgtcatcgtcatgctcatggccgatcatcgccttcagctgcgcccaggcccggtagtgcaatacggcgaagcgctggctgacgatgccgacgaactgctggaacgcctggttgcgtctggcgatgacttcggtgcgcgcgtgctcggtcacatggatcggcagcgggccgtagggggcgaacatgccgaaatgccgcgcctggatcagcacttgcttagggcgctgcacgatagaggcgatttcacgcgaagcgaacgccatatccgccggctgggtaatgcagagcctttcgcggctgcgatcgttggagacgccgagccgcggcgcatccggctgcgcgcgttcgatacgccgcagcagctcgaaaaaatcctgtcgattggacagcccgcggatttcggcctggcccgcgctttcgctttgcgcccccggcgtcggcgcctgttccaacgagagcgccgtttcacgcatcaacgacatatcagccatagtagagcgccccccagtcggcgtgggtttccccatccagcaacagcttcatgcttaacgtttggttcaggtcgccgtattggctcaacgcgtggtgcaatattttgccgaacagataggcgccgtggtcggcatgatggttggcgcttaagttgacggcgatctcggctccgcggatccaggccagcggccccggcccctgattgcgttcgaagtggtgctccacccaggcatttttgatgctggcgatgcgcttgcgctggctggagtcatcctgatggcagaacaacgacagccagtcgcgcaacagcgccgaacaatcctgaacgtcggggcgcgcatggcgcagaggattggaggccagcatctgaatcgcctgccacgcctggctgatgttcggcaccgcgaccgggttgctcgggtagcggacgatctccacctggtggatcggcatcgccgtttccagctggaaatgcggctgctgaaggtgcgccggcaccagatgccgttcgcagaccagcgcctcgacgctgagcgacgtgatgtcgtcgatgtcgatgccgcttttgcccggcgagatggcgatgaaggtatcttcgttgggcaggtgcggattgttgtacttggagggcgacggctcccggcgacggtgcagcgtataaccggccggctcccgctcgcagtcgtactgcacgtcggcctgcagcgaagagaaaatcaccgggttgccgtcgggcagcatgcctttcacctgttttacgctgtgtatctcatacagcgaggtgttcaaacgatcgaccaccagctggtgctccgtgcgctcatccgtcagcagcaccggcgagcaatggcggcgatacaggttgatgaccggggtcgcgaaaagatgaaaatccctggcgttgacgcgaccgatcagagtgagtgggcgttgctccagcgcgaacaagatctcgaactcgtgaacgcgttcacattggcgcagaaaatcctgcacgccatgcaactccaggctgaagaagcggcttggcgcggcgaagtattcacgcatcagccggttgccgggcaattcccccaccacggtgggcaacaaggcttcttcatcgctgacgccgcccaggcgcaagctgcccggcggcaagactttgacgattggccggtcgtcgcttttcgcccatagcacgatgcgcaaggtgcgattaagcaacgcggccagcagttgattggcccgcaccgtatcttccgccagcgtcaggtgcagcggctcgagatccagctccgagacgggaagcacgccgtgcgtcgtcaggcatatcctgacgtaggccgagcaatcctgcatgtgtctggcggcgccgtcaggcaaatggtgcggcggcaaaatctcgcattccgccagtgaaatctcaacgggctgcactttaatatgccgcgccgtggtgaacgtggcgggtttgttgttcagcgagatatcgttgagggtcatgcggctcccgcgcggcaggtcaacctggctgtgccactggggaaaagagagatcgggcttaatcgcgacggtggcgattgcgggaaccggcgtataccacagcggcgccaggcgtgagagcatttgcaaggcaaattccggctgctcattgttcagcttttcctggatgcgggtgcaaaggaacgcggagccctccaacagacgctcaacgaaaggatccagcacgccgtcgatatgcatgcctaaatgctgggcgacctggggatgagaagaggcgaactgacgaccggcctcgcgaaaataacgcagctcatcattatataattggagaaagcgctcactgaacatagtcacccctattaatcaaatacgtgtacggcgccacaggaataatcaagagcgatgcgcaaattaaccagcatttcgtcacccggtaatgagcaggtgccataaatatcgaataaaatcgccagcacatacgattggcgttcattcactacaggcaccacacgaatcgttttcggatccagacgcggctcaaacgaagtaatgattctttgtatatgtctcgccagcgttaacggatcggtattaatcggtatgcgttggctcagcgacggcaggccataattcaataccgaactttcgctgtgcgcataatcatgaagtttcaaatcagcgctgcgcgatgcgtcattcagtaaaaattcgatatcacgcaccaaaacacgccgccaattatcggcgctggcgctttgatgtctcacgctgagcttatcgaatagcatgggcaatgacgctttcatttaacacctcgcgataaggcttatgtctgcccgcaatcgctgcgggcagacagcctgcaattagtgttgtgacatcaatgatcagatacgggcattaagcttgaggtcataccccgtcttaattaccgcacccatggagccatcattgttttgctctttgtactcaacttcgatacgtgcgaaattcagcttgataacgtcggttggcagcacggtatcgatttcagtaccgatggtggaattcagcggcatattacccacggtcttgaatgaggaaaccaggcagttgctgaaggtcacggcaatgaagtcttgctgaccctggcctgatttacggcaaacaagttttgcctgaggaatatgctcgccggtggcgcacatcaggaacagtttcggcgaagccttgttgctcaccatgcgaaactcaaagtctttcatctcgactttgcctgaaccgccgccgctcccgaacccccaacggccggcgttttcttccgcccattgccaggcttgcagctgaatccagccagggtaggtttggtcgggtgattcaccatcaacaccctcaattttcaaaaaatagtctactaaagctttcgtgctcattttttgtctccttgactgataggtctacttcgttaattgaaaagtctattcagataagtcgttatattgcctacgcgatcattgaaatagcgacaatgagaacccattagccattaataaatagcaatagcgtaaaaaacagcgccactaaatttcaatgaaatatcaattcccaccaacgccatttaataattaacgtcggcaatatccaaaccaatgaccagccgtaacttatctgctcccatcttttttggctgacggaagttttgatacaagtcgcaaggacacggtcatgccttccaactggtaatgcgggcgcaaatagaaatgcgcgcggtaataacccggatcgtcttccacatcctcaacgcgcacctcggcggcggctaatggacgacgcgccttggtcgcctcggtcgatacggaaggatcgccatcgacgtagttcatcagccagtcattcagccacagctgcatatcgtctctggaacggaaagaaccgattttgtcgcgcacgatgcatttcaaatagtgcgcgaatcggcacgtggcgaaaatataaggcaagcgcgaagacagcttggcgttggccgtcgcgtcgggatcctcgtatttcgccggcgcgtgcatggtgcaagaaccgataaaagcggcgaaatcggaatgcttgcgatagaccaggggcaagaacccggcgtcggaaagctcttgctcgcgccgatcggaaatggccacttccgtcgggcacgtcagttcatatccgccctcatcggaaggaaacgcgtaggcgggcagttcttccaccgagccgccggattcgatgccgcgaatcttcgaacaccagccgtactcatggaacgcgcggttgatgttgacgcccatcgcatacgccgagttggcccaggaaaaatcatcatccacatccggcctgacggactcctcgaaagcgaactcttcgatcgggttggttttcgccccgtaaggcaaacgcgacaggaaacgcggcatcgtcaacaccaggtaacgcgagtcgttgctttcgcgcaggcggcgccaggacgcatattccggcgtggtgaaaatcttgccgatatcccgcgggttgcccagttcgttccacttgctcatctgcagcagcgacggcgacgcggcggaaatgaacgggcagtgcgacgccgcggaaattttcgccaactcggtcagcagcgtgacgctcatcgggctgtgatcgaattcaaaatcgccgatgatgcaaccgaacggctcgccgccgaactgaccatattcctgttcgtaaatctgtttgaacaccgggctttgatcccaggcggagccccgatagcggcgcaaattgcgcgtcagctcatcctgactgatgttcaacacccggatcttgagcgtttcgctgacgttggtgttatcgaccagataactcagaccttgccaggcggactccagcttctggaactccttgtggtgcaagatattgttcatctgttgcgaaagctgttcgtcgatctgggcaatcaacgattcaatggtcaatacgacatcctggctgaccttgaccttgcctttgttggcatattcggacagcgtgccgatagcccgacgaaccgcttccgaagcctcgttcgttctgggccggaatgaacgcttgagcaaaccgtcaagctcattttccgtgtcctgcgtttcaacttcagcgactgccgtagcctgctgcttagccgaatagcgtcgttgcctcgctctcattcctcatctcctttattgccgggatcctgcacatcctgttccgcatccgcgaccgttttacgcgcatccgtcaccaaacgatgcagaaaatcgggtttctccagcagattcttcaccacttcttccgcgctggatttaccatccatataggtgatcagctccgtgagatgctcccgggcttcaagcaggcgttgcatctgcggaacccgtttggcgatggcgccaggcgtgaagtcatccatcgattcaaactccaattccacgtccagcaacgcatcgtcttcgctcagggtgttctctacgtaaaattgcagacgaggcttgatggcgcgcatgcgatcgttgaagttgtcctgatcaaaggtcaggaatttccgctcttcgatcggcagcaaaggctttttccgatgcccagagagatcggacatgacccccgtaacaaagggcaactccactttcttttgtgaaccgtaaagctctacgtcatattcaatttgcacgcgcggcgcgttatttttaccgataaatttctgagagcttgagtccttagccattggaaaactcctttgtgataaaaattacttcccggacaattgatttaacgaggccagagattccggcaaaagctcctcaacaatcgtcgcgaagtccataccgatcattttttgtgaacgtcgaataagaatgggggccggatggctgggctcatagttttggaaatagtccaaaacctgatccaacagcaagatgacatcctgccgggaacggatatatttgccgggcatggcgacaggcgcgtcagcatccggcgagtcaatctccgcgtcatcccgttcagccggcaattcctgctgttccagtgaagccagctggcggctgaactgtttcaaatagtcgcgtacctgccggcagtccaaacgataatcttcagcctgcagattggcgtaattctcgacgcgctccagcgcatcgatttccagcgccaattgctctttcagcgaaggcagatttctgccggcaaaataactgtcggcttgccccagcacctttaccacctctgaaaaatgcaggcttttgccttcctgctcgtcaagccgcatattcagcagctcgtcggtggttaacggcgtgtcgggaaaaatcttgctgttcttgatttcgtgcagacaggacgatgtggcgagccaccctaatgcggccgcatgaaagctgtccgatgagggttccatgtccgcctgagggaaaatggtggcgccctcctcggcatatttggcgtcaatatccttaatgccctggtagaaggccgaaaaaccgtcgatatgaagattggcgcgcataaaccacagcacgacatgtaaatcgaagcactgttccagcaacgcggcagactgctcgcgaatggcgtgccaattaatatcacgcgcattgtctacggcattaagcggatcggtttgactgtcatattccgaaagcgtgaattcaatttcactgtatcgtggatcaaattcgacgccattcacttccgttgagatgacttcattcatggcctgatatccttttcaatcagcactagaaacataaagcctaataaagcgggcttttacgttcgccagtctttcccagagtccttttagcgtaagttagtcgtcaccaagctcgcaaattgtttagatgtattaatattaacaacaataatagattgaacctatcaatagaatcacagtgatcggtttaaactattttacatttacatatttattttttccttttaaaatcaataaattgcaaacaataattatgcaagctaagaataggaaaaaaatcaaaaactgccctaaaaacaacgttccatccttggtaggataattccagtaataccactggatacaaataatttaattagcaaatgataaccacagtaaatagtgaaattttttcataaaaccatgacagccagtcgtttcttgcaagcgggtagcacgcaatgatcaatagaagacgatggcagtgtgactttcatttccagcactcagtacttacacatgcgaaacctggtgtgaaaataaacaatttggcgagagttttgattattaattttaaagctaaagcacagattaacattccgccgtggtgcaccgaatacctattggtacacaaacagcctggtggataaagcatcattcttttatagttaactcagggtaatgatcagaataatttaagattcaattccccttcgtgtgtgttctcatacggcttaccgcggcaaaagcatcactgcggtaaagagtctcgcagactaaagtggcattagagatatcatttactataacggcaaaataaccacgtaagcgctgcaacgacaggaaccgtgttaagaccagcgatctgttccatatacaagaaatgtttccctaactgataagaccactaatttgatactagcaaaggcaaacccaatatcaagaaaaaatattatttttttaataaaaaaataacaaatcaatatacataaaacaaacaattcaataacttaaaacagtgctgaatcgattacttttacgccaggaaaaatagttcatggaaatttgccccccctcacaaccccctcagtcaatctccctcattctcttcggcattgaattgtcatcaaaaaataagaaaatctataaaaataaaacccgccactggccgtacgccccacaggatcaactttcgcaagacaaaataagcaagataattcccaataaaaaggccgaaaaaaagcgttaatgatttagcggttcaaaataaaaataaaggtaactctattgggttattaaagcgaaaacgcgcaccttttcattgctgcaaaaaaaccttatgaatctttacgttgcctgtcctttgacaatccttaatgaaaacgcaaatcgggtagccaacacatacagaaaagagatgggctacacggcgggccacctctgccgatgacttttctcatccccggttcggccggtgcgcacaggtcattccacctaaaaatcaggccgcaccgccggcctcgcccggctatttaacgccaagcccgccgttttcctgatccagaacagctttcgcattcatccgactgatatattgattgaaaatcattcctattcaggagaaaaagccatggttaagtcactcaatgcggcattcactcgcttttttgaccacccggacgccggcaaattggcgctcaggctaaccttcggtgggctgatgctgtttcacggcgtggcgaagattcagcacggcgtcggctggatcgccggggcgttgcaggaacaggggctacccgccttcatcgcctacggcgtgtatgtgggggagatcctggcgccgatactgatcattttggggctgttcacccgccccgccgcgctggtttacgcctttacgctggtggtggcgtttttgatggtgggcaccggcaaggtcttcaccgtcaccgacgtcggcgcctggggcattgaaaacgagctggtgttctttatgggcggactcgccatcctgctgctgggcagcgggaagtatgccatcgcgcggaatgaagcctatcggtaagcggtagcattaataaggaggttcttggtttaaacctccgctgtgcggaagcggcgtttaacgatcggccaaccggtataccggaacctggcgcgtcgtgccggtcagggtgtcgaaaatctccgtttccgccgtcacgatcgtcatgccggtttttcttagcctacgcacttctgcggcgatgcgctgtatgccgaaccagaacagtccgtccagcgccgtgacgcgcagcccctgctccagcgccagcttaagccgctcacgcggcgccttgagcgctttggcgatttcccggtaaggcagcgcgtccacgcccgacgccgaagttcggtgaatacgggtcgacaggccatattggaaggcctcaggcacgtcgcttaaatcgcttttcaggctgtaaacgcagccaaagcgcttgccgttgaacaccacatttttttgactgatcgacagctcatcgcgcaggccggcaatcagctgcggcgcccgcaccagcaataagcgaaacggcaattcgaaactggtcacatagtccacgttgagcagcgcaatgcgcagacgctgttccgccccggcctgcgtctggcgacactcgttcaacacctcgctccactggcgcgcgagccgcggggcttcatccagcggcgcgaagtggtatttctcgatgtggtagtcgatcctttcattcatgtccgttggcccctgcctcagtcatcatgccctcagcaaattaccttacccgcgggcaacagtacaacaccgcgatgaggtcactcgggaaatacggcgctggctttcgtcggaacggactacgcgggctcgatgaacagcatcatgcgttgcagtgcgtcatccagggcactgagcccggcatcatccagacaggccatcagctgtgcgtcataatccgccacccattgcctcgcctggtcaaaaatgggacgagacgccggcatgacacgcagatataccgcgcgcttatcttccggatcggggaagcgcgcgacccacccccgattgaccagttgggtgatcgtacggcctagcgcggtgcgatcggtctgcgaatgcgctatcacctcgctcatggccacgtcgcccggaaaactgtagagaatgcgcaacgcgcgccactcatggaggctgagtccttgcaaagcgagtaacgcagacagccgtttttcgcggtgacgcaccacctccgtcatcctgtaaagcgcaccattgggcaatcccattccccgtctgccactctgcgtgccttttttttcagaatccatactgtttccaattagcctcgacttttgccctgacctgttccggataagagtgcctgaaagaggcggtacccgcacgtgttacgccgctgaactgctcggggaacaggcagttgatgatggctttgccgccgctaccgcgcgccttgtcttcttccgtcaggtacggcaccatcgggaactcgcgtacgtccgggaagataaaatggtcgcgcgccggatgtgaacgcgtggccaacgcccaaaccacctgatcgatatcgacaatatcaatgtcattgccgaccaggatcagtttggggatcaggtagcccgcatgcgagccgaagaccacttccgccaccttgccggcaaaatccgccgcggtggtattcattccggccagtttttcgatatcgacggagaccaccgcccaacaggtcgccgcctcataggaacaccagacaaagtcaacgggcaaggccgcgctctgcagggtttccagcagctgagccgagatcatggtgccccagatcgtatgattttcttccggcggcgtgccggcgacgcaaatcggcaaaatggggtcatcgcgaaacgtcacagcacgcacatgaaacaccggctgttcatggccttgctggtgttgatagccgtgatactcccccatcggcccctccagcgccgtctccgtcaggctgatttcaccttccagcacaatttccgcattggccggcacccagagatcgttggtttccgcttgggtgagcgtaacgcttttaccgagcagcgcgccgacatagtcaggctcactgacgccggccggcaacggcatccccgcgaccgccaccgcggcaggcggcgccccgagcaccatcgcccacggcgtaggtttcccttctcggcgccacatttcacggatcatgccgatgtgttgggtgggtatcgccgggccggtgagacgattgcgatcgagcatcatgagcctgccgactccccagctatgccactttccgtccggggattgcacgacatggaacccgtaagtgccgaaatagcgcccgccatcccgttcatgcaacagcggtaccgggaagcgttccagatcaacctcgtcgccacgccaaatattctctttcaccgggccggtcgaacaataatccggcgcaaacggctccgccttcaccgcccggcgaatcgccgccacgatatcccgcggagcgctctccggcggcagcccaaaatggagggcgaggcgagaataggcatgttccgcagaagcgagcatgccggccggcgcgccaaggatgcgggctcccggcatcgcgcccgccacatgatgaaatagcggagccgaaagccgttgctcatagacccggcggcagacagccgctatctccaggtcggcggaaacttcctgatgcacgtcgaccaaatcgtttcggcgacgcaattcctcaatgaattgacgaaaatccagtgcgcaatcgagcaaactcatggcaagtcctccagtctccaggcggtcagccccttctgtcgccctcgtttcgggcaggagactgatcatttatgtgcatgtgcacacatattagtgcgcaaaaaatcgcgtgtaaatacactctatcctggaggcgttgggcatgttgtcagtctggcaaaattttcaagggatagcggactcagaccgtgcacgcccctgccggcaggcattatcgccgtgacggtttcacaccttcagcgtgattggcatgcatagcactgggcttgccgcaagcgccgcaccgggttcaagcgcaacgtggctcacaaaatgaagaacataatcgcaaaatgctattcgttgatattgcacgagttataatgcgggaaaggatctcggccaacgcaaaccggtttcatatccaacggtttacaagcattagcgaaagaaaaggattttgattcaatgggggaataacgcggggtaaagtggcggagagagggggatttgaacccccggtagagttgcccctactccagttttcgagactggtccgttcagccgctccggcatctctcctgacaacgcttgctatcatgcccgcttttgcggcatttttacagcattagcataccgctgaacgttcaagtgatgagtttacgagcaacctgatgattaaatggccgtggaaagcgactcaaccctctcaatcccaggcagacatcgaggcccagtggcaggacgcgctggcgatcccgctgctctcgccgctgaatgagcaggagcggcagcggctggtggccgtcgccgggcaaatattgcagcaaaagcgcatcgtgccgctgcaggggctgcagctcacctcgcaaatgcaggcgcgcatcgccctgctgttcgccttgccggtgctggagctgggcgcagaatgcctcgacggcttcaacgaaattctgctctaccccaccccgttcgtggtggaagacgaatggcaggacgagatcggtctggtgcactcggggccggtggtgcagtcgggccaaagctgggaacaggggccgatcgtgctcaactggcaagacgtgcaggactcttttgacctctccggtttcaatctggtgatccacgaagcggtgcacaaactggatatgcgcaacggcggcgtcgccaccggcgtgccgccgatcccgctgcgcgaggtggccgcctgggaacatgatctgcacgccgcgatggaaagcctgcaggacgagatcgacatggtcggcgaagaggccgccagcatggatgcctacgccgccaccgatgcggccgagtgcttcgccgtgctgtcggagtatttcttcagcgctcccgaactgctggccgaacgcttcccggcgctgtatcagcacttttgccgcttctaccgccaggatccgctggcgcgcctgctgcgagaccaggcggaaaacgacgcgcaatgggctgattgacgggcgcattgctcagataccgagcagtcgcaccgcctggggcaatttagcgttgacacacccggagccgctggatatgatgcgccccgttcacacgattcctctgtagttcagtcggtagaacggcggactgttaatccgtatgtcactggttcgagtccagtcagaggagccatatttagagaagcccgcttaaggaaacttaagcgggctttttgctgttgggcgtttagagcccgcgttgttccatcagcagcgccagatcgaccaagcggttggagaagccccactcgttgtcataccaggcgagcactttcaccaggttgccgccgatcaccagcgtggacaggccgtcgatgatcgacgaacgcgcatcgccccgatagtcgctcgacaccagcggttcatcgctgtaccccaggatccctttcagcgggccggacgccgccgccgcgcggaaagcggcgttgatctcctccaccgtcgccgggcgtttcagcgtcaccgtcagatcgacgatggaaaccaccggcaccggcacccgcagcgaataaccggtcaggcggccgtccagttcggggatcaccttgccgagcgccttggccgcgccgctggaataaggcacgatcgattccgccgccgcccgcgcgccgcgcagatctttttccggctgatcgtgcagcgcctggctgttggtataggcatgcgtggtattcatcaagccgtattcgatgccaaacgcctgatgcaatacctgcgcggcgggcgccagcccgttggtggtgcagctgccgttgctgaccaccttatgcagcgccggatcgtaaagctggtcgttaacccccatgacgatggtgatgtcgtcgttcttggccggcgccgagataatcacccgcttggcgccgccgtgcgtgatgtgcacttccgccttggctttatcggtaaagaagcccgtcgcttcgataaccacgtccacgcccacgctgctccaggggatctcggcgggatcgcgctgtgaaaacacctgaatcggccggccgtccagcagcagctggttgtcgccggcttccaccctggccgccagcgtgccggaaagcgtgtcgtatttcagcaggtgcgccagcgtcttgctgtcggtcagatcgttgatcgccaccacttcaaaatcgctgcgccccagcgccgcgcgcagcacgttgcgcccgatcctgccgaagccgttaatgcctactctcaccatgatgcactcctcatttgtggactttgcctaaaatctagcgccgaccagaagcggcgtaaatgacgtttaccaatcaatttacgccaaattgcgcgcatgaaagcgttcgcggtattcgctcggggtcagctgcagtttgcgctcaaacacccgccgcaggttaaggccgttgccgaagccggtggccagggcaatctgctcgataccttccgcgctctgttcgaggcgctgcctggcggtatgcaaccgcccctcttcaacgaatttggcgggagaaatgcccgtctcgcgggtgaacacccgggtaaagttgcgcgggctcatcgccacgcgctcggccaaccgatcgacgctgagatcgtcggcgaggttttccaggatccaggattgcaggtcacggatcggccccggcgatttggcctggttgagcggatagcggctgaactgcgcctgcccgccggggcggcgcagaaacatcaccaggtcctgtgccacttcgcgcgcctgcacgaagccgtagtcgtcctccaccagcgccagcgtcagatcgaagccggagctgacgccgccggaggtccagatcggcccgtcctgcacgtagattgggccgttttcgacctgcacccgcgggaagcgcgcctgcagcgtttccgccagccgccagtgggtggtcgcccgccgcccgtccagcaacccggcttcggccagcagcagtgcgccaccgcaaacggaagcgatacggcgcgcctgcggcgccgcgcggcgcagccaatcggcgaccagagcaccctcttcttcggtcgcccccttgccggcgacgatcacggtatcgcgcggcagggccggatcgagatccgccaggcgatgatcggccaacaggctcagcccggacaggccgtgcaccacccggtgagattgcgtggtggcgaccgcgatctgatacagcggcgtctcggcagggctcaggcgattggcctgcatcaggatatcggcgatgcccgccgcttcgaacagcatgcccccttcagggacgataatcaggaatgagtgcatggcaataatataaataacaatcaaaacaggccaggcgaccactgtataagaaaagccccgtcggttcaccctgcgggtataaaaaagcccgccgataatcatcgacgggccaggaaggaacggccatcaagcctgcggcaggttcaccccgccggcgcgcgccaattgcgccagcagcgccgtttgaaacgcctcatcgtgcaccgccgcgtgaggttcaaaccgctgctggtggtgccaatagccgccggacgccagtgcctgcggttcatcgctgctcaccagccacgcctgcgtcacgtgtcccagcgccagatcgtcgggcgcatccgcgccgcccattttggtcggcacccagccgggatcgaccgcgctgctgatgacgccgggccacaggcgcgccacggcggcggccagcgcggtgacgaacagcttgctgtccgaataggagccggctgcgccgccaagccagtccacgccgttcagttccgctacgccgtcaaagtgcatgctgctgctcaggtagacgatgcgatcggggcgttcgatcagggccgtcagcagatagggcgccatcacgttcaccggcatcacctgcggcccggtgaacatgccggcgttgtggatcaccgcattcgggcggccaagacgattcacctgctcggcgacctgccggatctgctgcacctcggacagatcgccaatcaccgcctgcgcgccatgatccagcagatcgcgcaccgcctccagacggccgggggcgcgcgcatgcaggatcacctgatgcccttccgccaacagcgtttgcgcggcggcgcggcccagcccgtcgaccgaaccggtaatgaaaatgcgtgacatgccactcctccgtttagcgccagccgagcgccggcgcgacatgggttaaaatcgattcgataacgtgggcgttataatccacgcccagctggttaggcacggtcagcagcagcgtatccgcttcggcgatggcctcgtcctgcgccagctgctcgatcagcgcgtccggctcagcggcatagctgcggccgaagatcgcccgggtctgcgcgtcgatataccccagctgatcgccctctttgccgctgccgccgaagtaattgcgatcccgctgatccaccagcgcaaagatgctgcggctcacggaaacccgcggctcgcgcgcatggccggcctcttgccaggcggcgcgataggcgcggatctgcttggcctgctggatatggaagggttcgccggtctcgtcattcttgagcgtcgagctttgcaggttcatgcccagcttcgccgcccagacggcggtggcgttcgaaccggcgccccaccagatgcggtcgcgcagcccggcggaaaacggctccggccgcagcagcccgggcggattggggaacatcggctgcggattgggttcagcgaacccttcgccgcgcagcgcttccaggaacacttcggtatggcggcgggccatgtcagcgtcggtttcgccctcggccggggcgtaaccgaaatagcgccagccgtcgatcacctgctccggcgagccgcggctgatgccgagctgcagccgcccgccggcaatcagatccgccgcgccggcgtcctccaccatgtacagcggattttcatagcgcatgtcgatcacgccagtgccgatctcgatacgttgggttttggcgccgatggcggccagcagcgggaacggcgatcccagctgacgcgcgaagtggtgcacgcgaaaataggcgccgtccgcccccagatcttcggcggcaaccgccagatcgatggactgcagcagcgcatccgctgcggaacgggtgccggactgggcggaaggcgtccagtggccaaacgagagaaaaccaatctttttcatcgggcatcgtcctcaaaggcaaaatcatcggcctacagtgacaaaaaccgcgcgccttgcgccagcaaaatcgcccccgatcgcactaaacgaaccgattgccgccgcgccgcccggcgattgtaatcaaaaaacaaatgtcgtataacaggcagctccgaggggtgtcctgttacgggctgagatggcgcaagccgaaccctttgaacctgatctgggtcatgccagcgaagggacggttaggcaacaacgcgattacccgttgcctgttcatacctcagcgtgcccggatctccactgactcaaggaggtcccatgtccatcaccaccctgttcgaaagcggtctttacggccggttgcgccaccatgccggcagccactggcaggactacgtcgatcacccgtttctgcagcagctggccgccggcaccttgcctgaacgcgcttttcgccgctacctgacccaggactatctgttcctgctgcacttcgcccgcgcctacgcgctgctggtcagtaagctgcgcaccctgccggagatgcgcgccgccaccgcctcgctcaacggcatcgtcgccgagctgccgctgcacgtggcctactgcgccgaatgggggttgagcgaagcgcagatcgccgcccagccggaggcggcggaaaccatgaactatacccgctacgtgctggacatcggccatgccggcgacgccctcgatctgttggccggtctgctgccctgcgtggccggctatgccgaaatcggcctgcggctgctgcacgatcccgccacccagatggagggcaatccttacgcctcctggatccgcaactacggcgacgagggctatctggccggcgtacgcgccgccatcgaactgctggaaaccgttggtcagcagcgcggcgcacaggatcgcttcaccgagctggcgcagattttcaccaccgccacccagctggagtcggcattttggcagatggggctgaacgcctcatgaccaccccgcttctcccgcccggtatccaggtgcgggatctcagcctgcgtttcggtcagcacatcgtcttcgaccggctgagcttcgatatcgccggcggcagcttcgtcgccctgctcggcgccagcggcgccggcaaaaccagcctgctgaagatcatcgccggcctggcgcaggccagctctggttcggtgatcggcagcgacggcctgccgatcgccgggcgcatcgcctacatggggcaaaaagatctgctttacccgtggctgaccatcgaggagaacgtcgccctcggttcgcggctgcgcggcgaaacgccggatcgggcgtgggcggcgcacctgctggagcgcgtgggcctggccgcgcatggccgcagcctgccagcctcgctgtccggcggcatgcgccagcgcgccgccatcgcccgcacgctctacgaacgccagccgatcgtgctgatggacgaacccttttccgcgctggacgccattacccgcgccgagatccagagcctggccgccgagctgctggcgcaaaataccgtgctgttgatcacccacgatccgatggaagcctgccgcctgagccaccggctgctggtgctgtcgccctggccgctgggcctcgacgatactcatcgcatcagcgggctaccgccgcgcgcgccggatgacgccgacctgctgaaaagccaggccgagctactgcagcagctggtgagggcagcacaatgaatagtgcccaagagcgtggactcacccgcctgcggcgcgggctgacggtattcgtcggcctgctgctgctgtggtggctggcggcgcaaagcggcatcccggcctttctgctgcccacgccgggcgcagtggcgcaggcgctgtgggacgggcgcggctatctcgcctggcacacgctggtcaccgcttcggaaatcgtcagcgggctggttctgggcgtgttgctcggcgcggcgctggcgctgtgcatgattttctcgccgcgcctgcagcgctggctgatgccgctggtgctcaccagccaggcgataccggtgttcgccctggccccgctgctggtgctatggttcggcttcggcatgagcgccaaggtggcgatggcggtgctggtgatcttcttcccggtggtgtcggcctttttcgacgggctgcgccgggtcaacaacgactacctcgatctggcgcgcacgatgcgcgcttcgcgctgggcgcagctgcggcacgtgcggctgatggcggcgctgccggccttcggctccggcctgcgcatggccgccgccgtcgcgcccatcggcgccatcatcggcgaatgggtcggctcggccgaagggctgggctatgtgatgctgaacgccaatgcgcgcatgcagaccgacgtctgcttcgccgcactgtttattttggtgctgatgaccgtgctgctgtgggccgcggtggatgcgctgctgcggcgcctgatcgcctgggcgccggaaaacgactgatgattgcaaccataaccagggataaaggaacgaccatgatcaaacaaaccgtctgcgggctgttgctcggcgccgccatcaccggccaggccggcgcggccgacaagctgacgctggtgctcgactggtacatcaaccccgatcacgcgccgattatggtggccgagcagatcggcgccttcaaggccgcagggctggacgtcaagatcgtgccgccgtccgatccggcgctgccgccgcggctggtggccgccaaacaggccgacctcgccatcacctatcagccgcagctgcatttcttcgccgatcagggcctgccgctgatgcgcgtcggcacgctgatcaacacgccgctgaacacggtgatcgcgctggataaaaacatcacctcgccggcggatctcaaaggcaaaacggtgggttactcggtcagcggcatcgaacaggcgacgctggccaccatggtcgaacacgagcacctcaagccgcaggacatcaagctcatcaacgtcaacttccagctgaccagcgccctgctggcgggccaggtcgatgcggtgatcggcggctaccgcaacatcgaagcgctggagctgaagctgcagggtaaagaaccggtggtgttcaacgtcgaagattacggcgtgccggcctacgacgagctgatcatcgtcgccaaccgcgatgcggtgaacgagccgaaaatccgcaaattcctcgccgcgctgaagcaaggcagcgactacctgcacgcgcacccgcaggacacctggctggcgttcgccaaggcgcacccggagctgaataccgagctgaacaaacaggcgtggcaagccagcctgccgctgttcgcccgcgatccggccaagttggatcgcgcgcgctaccaggcatacgaacaatttctgttcgacaacaagctgatcaagaaagtcaccccggtagaccagtatgcggtggagctgaactgatcacgccgaggcggccggcggcgccaccgtcacctcgccctggccgctgcgctgcagggccgccttcaccagcccattggccttgcagcgttcgataaacgcgttcacataggcggcgccctgcgtgttttgccgcggcaccgccatcgcctggcggatggcggtaaaatgtccgtccagcactcggtagccgggatgggcggccgcggcggccaacagcggttgacgcacgccggccgccgcctccagcccccgttcgaaaaacagcgcgatcgcctcggcggaggttgccgcccgcaccaattgcgcctgctgcagcgtgcgcgataaaaacagatcgtacgccgccccctgcccgaccgcgatgcgcacctccggccggtcgagctgcgccacctcagagtaaggcgcgtcgttcgccaccagataagtcccctcaatgatcacgtagggttcgctgaaggcgatttgcgccgcgcgcaccggctcgatagccataaacgccaggttccaggcgccgctctccagatcggcgaacaccttgccggccgcgtcataggtcaccagctccagcgccacgcccagttcgcgagccagcgcggcggccagctccaccgaagcgccttgcggtttgccatcagccccggcctgcgccagcaccggattgccgtagttgatcgccgcgcgcaacacgccttgcggggccagatcgtcgagtaccgctgcggggattgtctgcatacttcctcctgaatggctgatggatgcaccgtcgtggcgctcattaagcgtagagcgaaacctccgaccagcaagctttcgccgccgcggccgccgtcggcgtgattaacgtcacactattgtcataaaaatgtacaatagccgccgctcgtcggccgtagcgggagatcgcacgttgttccgccgccggcaataggctatacccttcacttttcgcaccgcggcacgctcggcggcgcaaaccagggcagcaacggttttatttcaatcagacaaggtttggcggatggttttagcagtcgtttcgtttgttctctttttggcgtcgattttgatttatcgcacccgggccgccgccaaccgctggtggttcgccattctgctgacgctgctcggcagctatctggtgctgaacgtcatcctgatcgccagcaactacttcaccggcgacggcatcaccgatgcggtgatctacaccgtcaccagcagcctcaaaggcgcgggcatcagcaaatacgtgctgccgtttatcggcctgctggcggcgttggggcttatcttcgcggtgctagcccgcagcctgctgcgccgcaaggccaaaggcagcagcgtggcctacagcgtcgtcgccgtgctgctggcgctgttttcggtcggtaccaccccggcgtttcaggacatctcgctgctggtcaagagccagatcgtcggcgataccgccgatttcaccacctactacaaggcgccgaaaaagaccgtgcagggcaaacggccgaacctggtgtacatctatgccgagagcctggagcgcacctacttcgataccgagctgtttcccggcctggccgacgagctgaacgccctgcgcacggacagcatcgatttcagcaatacccagcaattgccgggcaccggctacaccatcgccggcatggtcgcctcgcagtgcggcattccgctgttcgcgcccttcgacggcaacgcctccagcgcggtctccaccttctacccggagaacgtctgcctgggcgacgtgctgaaggccgccggctacagcaactatttctatcagggcgccgagctggcgttcgccggtaaagacaccttcctgaaatcccacggcttcgaccacgtttacggcttcaaagagctgcgcgatcaggtcgccgatccgagctacaaaaatgactggggctggtacgacgacagcgtgctggacgtggtgtacggcaagttcgtcgagctgtccaaacagcgccagccgttctcgctgttcaccctgaccgtcgatacccatcacccggacggctttatctccgccggctgcagcaagaaaagctacgcctggcagaacaaggaaaaccgctcgctgagcgcggtagcctgcagccagcaacacatcgccgcgctgatcgacaagatcaaacgctcgccctatttcagcaataccgtgatcgtggtgtcctccgatcatctggcgatgaacaacaccgcctacgatatcctgaccaaacagaagcgccgcaacctgttcttcatcatcgacggcacccggccgctggcggaacagcgcaacgagaagcgcagcacgctggacaacggcgccacggtgctggacgtgatgggcggcgacaactacatcggccttggccgcagcagcctgtcggcgccgtcgctgtctacggtgttcctgaatatcgaagagaagatcaacggctggaaaccggcggtgatcaatcagtggggcctgccgaaccgcatcagcgactacagcgtggatacgcgccaacgcagcttcagcttctccggcgtcacctacaaggtgccgttcatcctgcgggtgggcgacaaccgcatcgaaccgatgttcaacgtctacctctccaccccgctgcgcatgcagctggccgggctgggggcgggggagaaattcgtctgggtcgataaatgctacgagatcggccgggtctgggcgccgcagctggcgctgagcaccgacatctgcgtggcctcgggcaccctggcctcgccgccgcagatcgcgcaggccagcggcgaacgcttcaacggcaaggtgaacttcaccggcccggcggcggacagcgtcgccgattatcaaaacgccgtcgcccgcctgcaggtggacgacgcggcggtgaaataccgggcggacaccatcgagttcatgctgcccggcatgccggaacaggtgaaagccatcaccggcgtctccgccgtcgaggaatggggccgctggtccgacgccaatctggcgccggcggtcgacatcgattacgtcgatccgctgccgaagcgcttcgatctggtgctgcgcgcccgcgcctacggcaacaacgtcggcgaaccgatttcggtgcgcgtcggcgacgaagagcgcttcgtgtcgctcggtgaacaggacagcaccgtcaccctgcgcttcgacaacccgcgcggcgcgcagaagatcagcattactccgccggcgccgaccgagccgaaagagagcgccagcggcggcttcacgccgaagaagttgggcatcggcctggtgtcgctgaaggtcgaagcgggcgctcccgcctcctgatcccccgccttcacgggcgcggtattttctttgccgcgcccgtcatttcgaccaagcttttacgcccttcttcggctaacctgtgacggtaaaacgccgcaaccccgccacagagccgggacatccaaggagaaagtatgagctatgccccacctcgcagcggcctcagcgccgatcaggcactcgatcaactggaagccctgtatgacgccgcggtagacgcgctgcggcaggcggtcagtgactttatcagccacggcacgctgccggatgcacaagcgcgcgccgccgggctgttcgtgtatcccgaactgcgcgtcagctgggacgggcagcaatccggcccgagcaaaacccgcgccttcggccgctttacccatcccggcagctacagcaccaccgtgacccggccgcagctgttccgccactatctggccgaacagctggcgatgctggaacacgattacgccgcccatatcgaagtggcgccgtcgcagcaggagatcccgttcccttatgtcatcgacggttccagcctggcgctcgatcgctcaatgagcgccggcatcgcgcagcatttccccaccaccgagctggcgcagatcggtgacgagaccgccgacggcctgtaccacgccaccgacaaccatttcccgctgtcgcatttcgatgcgctgcgcgcggatttctcgctggcgcgtctgcggcactacaccggcacgccggtggaacattttcaaccgttcgtgctgttcaccaactacacccgctatgtggacgagttcgtgcgctgggcctgcgcccagatcgccgatccggccagcccgtacatcgcgctctccagcgccggcggcacctacatcacgccggaaaccagcgccccggagcaggcggtgtccgatctggcgtggaaaaaccaccagatgccggcctatcacctgatctcgcgcaccggccagggcatcacgctgatcaacatcggcgtcggcccatccaacgccaagaccatctgcgatcacctggcggtgctgcgcccgagcgcctggctgatgatcggccactgcggcggcctgcgcgaaagccagaagatcggcgattacgtgctggcccacgcctatctgcgcgacgatcacgtgctggatgcggtgctgccgccggatatcccgatcccgagcatcgccgaggtgcagcgcgccctgtatgacgccaccaagatggtcagcggcatgcccggtgaagaggtcaaacagcgtttgcgcaccggcaccgtcgtcaccaccgacgatcgcaactgggagctgcgctactccgcttcggcgcgccgcttcaacctcagccgcgcggtggcggtcgacatggagagcgccaccatcgccgctcagggttatcgcttccgggtgccgtacggcacgctgctgtgcgtctccgacaaaccgctgcacggcgagatcaaactgccgggccaggccaaccgcttctacgaaggggcgatctccgagcacctgcagatcggcatctgcgccatcgatttgttgcgcgccgagggcgatcgcctgcactcgcgcaagctgcgcaccttcaacgaaccgccgttccgctaacggtgctcaggcccgctgcggcgggccgttttttcctcaacgcaccagcgccagcgcgcgcttctcctggctgcggccgccggcgatcgacagcaacaggtctttcaccagcagcgccggggcggacagcccctgttggctggacatgcacagtgacagcggcaccgacatcgtcggcgcattgatgcgcgccatccaggccttggccgggccgatcatcgcgcgcgccaccgattccggcagcacggtcgcccccaacccgctggcgatcgcggcgctcagcgcgcccgaggattcgatctcccccaccacgttggcagccagcttgcgcagcgccatcgcctcctccagctggttgcgcaccgcatcgccctcgcgcggcaggaacaggttcagccgcgccacgtccagcagctcgacgctgttgccgggatgcggcaccgcgcgcgtcgccaccagataaagatcttcccgcatcaatgcgatggcgtgcagaccggcgggcattttggcgccgtagaccatcgccatgtccagcgtctggttagccacctgcccggccaacgccgcgccgccgttttcatgcaggctgagcaggatgcccggctgctgatcgcgcagggtctgcaacagcggcagcgccagctgcgccgcagtgctgcccgacgccagcccgagagacacctggccgctcatcgcctgcccggcgctgttgaccgcgctctgcgcctgttcgcactggcgcagaatggtctgcgcgtgggcatacagaatgttgccggcctcggtcggctgcaccccgcgcttggtgcggatcagcagctgctgcttcagctccccttccagcgtcgccaactgctggctgagcgccggttgggcgatgtgcaacacctccgctgcctgggtcaggctgccgatatcgacgattttcacgaagtacttcagacgtctgaaattcatagtgcctccagcgagccgctaaattgagaatgccgaaatccggtcatgcaatcacagcaagatccaggccagagtcggtaaacggccgtggaagcggggtacaaggcggtaaatggccgttcgccgggcggcgcgcgccaccgcgcagggcaaccgttgcaccatcggcaggcaaatgcgccacacaacgggcaattcgacggcgctgcgcgcgggataagcgacaaaagcgagaaaaagcagcaggttgggcaatcttgcagcaaacgaacgcatcgggcgttttcacgctttacaagccgcaaccgccccgctattattcgccccgttccaacgattcctctgtagttcagtcggtagaacggcggactgttaatccgtatgtcactggttcgagtccagtcagaggagccaaatttagagaagcccgctcagggaaacccgagcgggctttttgcctttcagccgccgtcaaaagctgcgtttcgccaccagataggcgcccgccaccagcaataaggcgccgaccagcgccggcagattctcacgcagcgccgccggaccggcgcgataggcatcggccaacagccccatgcacagctggctggcgaccaggatcgaaatggtggccgccgcccccagcttctggtaacccagaatgccggcgaacacgaacagcgatcccaacagccccggcaacagcatccaccacctggcggcgccggtcacttccgccaccgcgccgaggccgtttttggccagcagcaaccccaccagcaacaacaaaccgacgctggagttgatcaccagcgtaatgaggatggtcgaaacgctttcggtaatgcgcaccatcagcagattctgcaccaccagccccattcccgccgcgatcagcagtaacagcatattcatcgccctgtctcccgggatcagcgcgcgggcggcgtcgcccgctcgtcgagcctcagctgcaggaaggtcagatccagccattggccgaatttggcgcccacttgttccatgcgccccacgtcgcgaaaccccagcgccagatgcagcttaatcgaggcctgattgccggattcgatgccggccaccatcacgtgcttgccgatttcccgcgcccgtgcgatcagcgccagcagcaacgacttgccaatccctgcgccacgatgcgcctgatggacatacaccgaatgttccacggtatggcgataaccatcccaggcgcgccagtcgccgaacgacgcgtagccgatcgcctcgtccgcggcgttcaccgccaccagcaccgggtagcccgccgcctgccgctcgccgatccacgccgcgcggttggccgcatccacggtttgttcattccagatggcggtgctgttcaacaccgcgtcgttatagatagcggcaatcgccgcgctatcgttgagcgtcgcatttcgtataatcatggtttacctcggccaattgtccactataatactacgatatgaatattaaattagacaatctaaatcagctgatcggcgcgcgcattcgcattgaacgcgaggcgcgccactggtcgctgtccgatttggccgaacgggcgggcgtatcgcgggcgatggtgcataagatcgaacgcggcgagagcagcccgacggcgatgctgttgggcagactggcgggggcgttcggcctcagcatgtccaagctgatcgcccgcgcggaaacgcaggaaggccggctgctgcgccgggaagatcaaccggtctgggtcgatccggagagcggctacgtgcggcgccacgtgtcgccgcgcaccgatctgccgctcgatctggtgcgcatcgaactgccggccggcgcagcgatcccgatgccggcttcggtgtatgccttcaagcgtcagctgatctgggttttatccggcgaactggtctttcttgagggcgacgcgcgccatgaaatggccgaaggcgactgcctggagctcggcccaccggcggactgccgctttgaaaaccaaagcgatgaggcatgcgtgtatatggtggcggtgctgagcgccgcctgacggctcaccggcgctaccccggcgtcggctggttatagccggcgtggaaaaacttctccgccaaccggctgtcgccgccggagaagaactcgctcatcggctcgcggccgaggccataggcgcggctgagctgcccagcctcgaacgccgcccggttctcgtcgccgcagcgctgcgccaaatggtgcgcataaccgagcacgaaaccgcgcttgtagtcggagcaaaagcgcgacagctccgcctccggcttcaggttctctacctttaaccccgccaacaaccctttgccaaaatgatctcccacgggttcctcctcaccgcacaatcgttatataacaaaatatacagcgaatgagcgaacgagaacatactccctaagttttactcgccgcataaaaaaggcccgccaagcgggcctgcgagaaagcgggcaatcacagcgtgaaattcagcccttcgctgacggtcttgccgagcggcagacggcccgacggcgcttctttctcctgcaggaaatccggcaggcgggctttgtcgcccggcttgccgatcgccaccatagcgtgcaccgcatagtcgtccggcagttgcaacgccgctttgatcttatcgtggtgaatgccgctcatgcagtgggtcagccagcctttcagatgcgcctgatgcgccaggttggcccaggccgcgccggtgtcgaacgcatgggtcgggttgtccaccaggcgctcgccgttcaggctggtggttttggagacgatcaccaccagcgccgaggcgtgttgcgcccagccgcggttgaagtcgatcaggaactccaggtagttctcccagctgtcggagccgtgcttgctgtaggcaaagcgccacggctgaatgttgtaggccgaaggcgaccagcgcgctgcttcaaagaagctcagcagcgtttgatcgtcgatggcgtcgttggtcatcgcgcgcggcgaccagcgctcgataaattgcgcgtcaatcgggtaatcggagattcttggctggctcatgataggttctcgcagtgaagtaaaaacaaaagttcgctgatattcccacagcttaggacggtaaaacttttatttcgtgccattgtcctgcggcaattcctgctgcaaccaggccagaaacgccctgaccggcggatgccgctcgcgccccggggcgcacagcacgctgtatgcggcgcccggtacgcgcacctccggccggtacgccaccagcagaccgttgtccaccatctcggacaccatcaccgagctggcgagcacccatccctgcccggccaccgccgcctgcagggcgtaatgctcctcgtgatagctgcgcatcgccgcatggcgctgccaccagtccacgccagcggcccggcaccagtcatgccagccgctgtcgtacagcgccgaatccccccacttgacggtgatcagcaccggattttccggcggagcggcggccagccccggcgcggcgtagacgccaaagctttcctccagccgcgccgcctgatgcagcgcgggatagtgcgcgcggctgtagcgcaccgccacatccacgctggcgtcctgctgcaggtcgatcacctcggcgcaggcctccaggcgcaccagatagtgcggatgcgcctggtagaaacgccccaggcgcggcaccagccacagcgccgcgaacgagtgcgtcaccgagacgcacagcgagccgctgctgggctgcggccgcaggccctcaagcgtggcggcgacatcaagcagcgcgccgtgcacgccggcaaacagcgtttcgcccttcgccgtcagccgcacgccgcgcggcacccgctcgaacagcgcaaaacccagctgctgttccagcgccttgatctggtgcgaaatcgccgtcggcgtcaccgccagctcggccgccgccagcttgaagctgcgcaggcgagcggcggattcaaaggtgcgtaacgcgttgacgggcagcgtagcgaacatggcgaagcctcttgggatgagttgagttcatcctggcagaaaaaccgtcatttgtcgcctgcagacgttcgcttctagattaaggctgagttcacttcacaccaaggagtatgacatgaatacagctcatcaatccaagcgcctggtggtgctgatcggcagcccgcgccgcgacggcaacagcgccacgctggcgcaggcgatcatggcgggcgccgccgaagccggcacttccgccagcctgcattttctcgacgattacctgagcggtttcctgagcgatgaacgccatacgccgccgccggccgatcgctacgccgagctgttcctggagcacttcctgccggccgacggcgcggtattttgcacgccgatttactggtacggcatgtcggcgcaaaccaaggcctttttcgatcgctcgttcagcttctattccaacgcctaccctcaggcggaacaggtgcaccaacgcatgagcggcaaacgcatcgggttggcggtggcgtcggaagaaacttatcccggcgcggcgctgggcatcgtgcatcagatccaggagttcagccgctacacccattccgccttcgtcggactggtgcacggcgccggcaaccagcgcggcgagatcgcccgcgatccgcgcaacccgctgcgggccgcccgcgagttggggcgcgagttcttcacccgcccctactcggattatcagatggacagcccgcgcagcacgcaggtttggacggaatagccacggcctcaaccgccactgccgatttgccagataaaggtcggcgtatggcggttaatttcccagtcaccgatattgcgcgccttgtagatcaccggattatgtgaagagagcgtgcgcgcattgcgccagtggcgatccaacgccttgccggtacgggtatccgaagcgccgagcgcattgaacaattcaccggcggcgcgctgcacccactccccggcgatgacctgcgccctggccgcgtccagctccgccgtcacgttaagcgcctgcagcagcgcttcatcgccggatcgatgcgcctcataagcctgctgcagcgaggaagtcgcttttagcaccgtcgcctcgaccgcataggcccaggcgctgatttgccccaccacctgctggatctgcacgtcgtccttcacccaaccggcgttgccgtggctatagatccttttacgttgcctcacgccctcgccgacgtctcgcagcaccgcgcggccgatccccgccagcgtcgccagcaacacatgctgatagaacgcagtttggtagcggaagcgctcggcaaagtcatagacgtgcgcctgctcgacctgcgcatcaataaaacgcgtggtgccgctgccggtagtgcgttggccaaatccgtcccagtcgtcgtcgcgctctacgcccggctgggcgacgttaaccaaagcgatcaccgggccaccgctgtcgctgcgctcggcatacacgtcgatccaatcggcaaacagactgccggtgctgtaaaatttctcgccgttgagcgaccagccgtcggcctgcggcgttacccgggtattgacctgccccagcttcacgccgccgatctcggtccaaccgctgccgaccagctcgccgtcgagaaagcgttcgaaccagcgatcgcgctccgggccgtccggcgcgttcagccgatcttccacgaaggcgaaatgcgcccgcagcgcctgcggcaggttagagtccgcctccgccagttcggccagcagttcgaacagctgcggcaacgaagcgccgtcgccgcccttttcacgcgggatgcgcaccctgccgaaccccgcctctttcagccaacggatcggttcatgcggcagcgtgcgcgacagctcgcgctccaccgccccagcggcgatttcggcgaagatcggccgaaaacgcgcggccagctgtgcgtagtctgctccggtggataacaggtgttgcgtcatgtcagtgtcctctgcggttaagcgcgatcggccagatcgtcgatatcgcgcgccgtcggttcgaagcgaatgatcagcaggaagacgatggggatcgccgccgccagtgaaacaatccaaaacatgtcggtgccgaagcgcgcctgcaaaatcggcagaataaacagcgccagcgcgctgccgataccggacagcgaacggccgaaaccgacgccggtggcgcggatcgccgtcgggtaagagagcgccgggtaaatcatcatctgcgcgccggggccgaagccttcggcgaacagccataggcccaacatcaggatcgccagcccaacgccgaacgccgcctgcggatgcccgatcaacgccagggcaatcagcgcgataaactgcagcgcaaatccggcgatcgccacgtggcgcgacggatacttccatgccagacgcatgccgagcaggccaccggtaaaggcgaacaacacgttcagcccgagcgaggcggagagggtttcaaacaccccggcgccgagaaactgcgccagaatcgacggcagaaagaaggcgatggcggtgtattcaaaggaaatgcaaacgttcatcacgcaggagaccagagtgcgctcgcggtacggcttgcggaacagcacgcggaagctgaccttcgccgccgccggttgggcggtgtcaggttccgcctcatgggcggcgatgccgtatgactcacgcaggatgcgcgccgcctctttcaaatcgccctggttagcggcccacagcggcgactcgttcataaacttgctgcgcaccatgatgatcagcagcgccggcaccgcgccgaaaatcaacgaggcgcgccacagccagttcgcatgttcggccggcaacagaaaatagagcgcaaagatgatcagaaaacacatcgacgaagcggcgtaccacatcgggcaccaggccgccaggcgcgacgccttgttggccttgccggagaatttggagaattcggccagataggccatcgccaccggcaaatcgatgccgacgccaatacccatcaaaaagcgcgcgccgatcagcacccagacgttgggcgccagcccggcggcgatggcggaaaccacaaaaaacagcatatcggccataaacacctgatagcggccgtacttgtcggtcaaccagccgccgaccaggttgccgagaatggtcccgaccatgatcgaagaagttaccaccccggtcagcagcgggctgaggctgaattcacgcaccacgtcatcgatgccgtaagacagcgtggtcagatcataggcatcgagaaaaacaccgcccagcgccaacagcacgatcatgcgcgcatgggtatttttctcgctgcgttggttaatcaaacgcgccacatcgctggcggagccgatgggcgcagataacggcggcgcggtatcgatatttaaggtactcatagcttcctcgttgtaattggcaggtgacacctcgtttatagggtgaaaaaattacgccgacaaacaacaaatatttctataaatatcattaaaatcaataaactaaacacagttacagcgtaacggaaacgccggattaacacgcgttaatccggtctttatcacggccatttcgggcggggattattctgccgagaccggcaccagcacgcctttcaccagcgggtcgtcggtgtttttcagccacgcctgcaacctgggatcggcaaacgcccgctgcagcttgcgaatattttcgtcctgcagatagggcgtgccaatcaccagctgcgaggcgaaggtcttcggcgccggcgggaacaagatgcccttctcacgcggcactttgccggcgtcgaactgcgacacatagccaatggccgcatctaccgaattcagcgcgcgcggcatggtcagcaaatccagctccttgaagttaaaatggcgtttgttctcgcgaatgtctttcagcctggcggtgcgcgcctcgatcgccggatccagcccgatcagtccaatgcgctgcagcagccacaacgcctgcccctgattggcgccgtcgttgggcaccacgatctccgcgccgtccggcaactcggcgatcgacgtatagcggtcggaatagatgccgaacgcccactgaaacaccggcagcgtcggggtcagcttaaaaccgttggcctccaccacctgctttagccaccactggtgctggtagatcgtggcggcgtactgcccctgcgccaccgcacgatcggcctgcaccgggtcctgcaggccaaccgcctccagcctgaggccgtaatccggcgcgatatgctcgccgacgtactcgatcacccgctgctctccggccatcgccggctcaaagtgcactttcagcgtgctgccgaactgcaccgtctgctgctggcgggcgctgaagtgccaaaccgcggcggcgataatcgccaccgccgcgatacccaccggccacggccagcgtttcttcttcactatctcaaaatcgtgattaggcatgattaaagggtttcctgatgatgacgcaacgcggcgaccaggcggtcaccaataaactgaatcagttggatcgtggcgatcagcaccacaatggtggcgatcatgatgtgattgtcgaaacgctggtagccgtacaccaccgccagatagccgatgccgcctgcgccaatggtgccggcgatggccgaatactcgatcatcgagatgacgttcagcgtgatggcggcgacgatcgccggcagcgcctcgctgagctgcgcgcgggtgactatctgccagatcgaaccgccggacaccagccccaccgccgtcacctccggcggcagttcgcgcagcgcgttctccaccagccggccgaagaacggaataccggcgacgatcatcgggatcaccgccgccggaatgccgatggtggtgccggtcaaccagaaggtgaacggaataatcgccgccatcagcaccagaaacggcagcgaacggcccatgttcaccaaccagctcagcgcgcgattcagcgccgggcgcggaaacaagccgcgcgatgaggtgttgaacagcaccacgccgacggcgccgccaatcgccaccacaaacagcatcacgatgccgaccatcagccaggtttcgccgtaggccggcagcatcaaccgatggatctcgcgccagggtgtgtcctggctcatcacgctgtcagacagatttttcataccgcctccttcaacgccgccggctgttccagcacctcggcgagaatgcccaaccgccgcagctcgtcctgcagttcagccaccgaacgcgaaccgccgccaaaacgcaccgcaatctccaaccgcccggccaggctgccgcccaccacttcaacgtgcccacccaacagatcgatctgcaggtcgagttggcggctgatgcggctgatccagtcggtggccgccggctgacgggcgcagtaggttacctgcagccgcaacgcggcgtcggacgccagcgtcttcagcgggaacagccggcggcccagcgaggaatcgggcgctgccaacagctcgcgcaccggcccttgctgcacaatcacgccgtcgcggatctcggccaccgcgtcggcggcgtcgcgcaccgcatccatctcgtgggtgatcaggatgatcgacaggccataccgatcgcgcagctgtttaagcaggctgagaatggccccggtggcgtccggatccagcccggaggtggcctcatccgccagcagcaccgacggattcagcgccagcgcgcgggcgatgccgaccctttggcgctggccgccggacagctgcgccgggtaaaacgccgccttgtccgccagccccaccgccgccagcaggctctttacccgcttgtcgatatcgcgcggcaccacgcccagataggtcaacggcagcgccacattctgccaggcggttttgcgctgcagcagcgcggaagactggaacaccgtgcctatcgcccgccgctccctgcgcagcgcctcgcccgcaagccgcgacaagtcctggccgttcacccggatactgccgctgctcggccgctccagcaggctgatgcatttcgccagcgtcgatttgcccgccccgctggggccgaccacggcggtaatcgatccggccggcacccgcagcgtaacgcccttcagcacctcaatccggcgcccgtccggcgcgcagtaagccttgtgcaactcctcaatctctatcatcgcatcctcacttgacgctcagtgcatcggccaaggacgcaccggccggccagcggtagcccaccgccgggtgcggctccgccaggcgcggcccctggttgaacaatttttctcgcagagtgcccgccgtgtagtcgcgcttgtacgctccgcgtttttgcagctcggggatcagcagttccaccacgtcggtgaaggtttcatgggtaacggcgtaggccagattgaaaccgtcaacatccgtttcctccacccacgcctgcaattcgtcggccacggtttgcgggccgcccaccaacagcgggccgaaaccgccgatgccgacccattcggcgatgccctgtactgtccattcacggctgggatcggcgctggagaaagtttccaccgccgactgaatggcattggtgtgcagatgcttcagcacctgatccggctgatactggccgaaatcgatgccggtccagccggacaccagcgccagcgcgccttcgtagctggtataggatttgtattcccgccatttttcctgcgcctgtcggtcagtttcaccgacgatcaccgtctgcaggttgaagatcaggatgctgcgcggatcgcgcccggcctcggcggcgcggcggcggatatcggctacggtttttttcagcaatgttttcgaaggagaagcgacaaacacgcattcggcgtgttccgcagcaaactgcttgccgcggctggaagcgccggcctgatacagcaccggcgtgcgctgcggcgaaggctcgctcagatgaatgcccggcacctggaagaactcgcccttgtggttgatcggatgaattttcgccggatcgctgaagatgcgccgctgacgatcgcgcaaaatcgcgccgtcttcccaactgccctccagcagcttgtaaaccacctgcaggtattcatcggcgtagtcgtagcgcgcatcgtgatcggtctgcgcccggtggccaatattgcgcgcgccgctctccaggtaagaggtgacgatattccaaccgatgcgccccttggtcaggtgatcaagcgtcgacaatctgcgggcgaaaggataagggtgctcgaatgacagcgaggcggtcagcccgaagccgagatgttcggtaaccagcgccatcggcgtcaccagcgccagcggatcgttaaccggcacctgcgtagcctggcggatcgccgcgtcgccgctgccgttaagcacgtcgtaaatccccagcacgtcggcgataaacaatccatcgaacttgccgcgttccagcaggcgcgccagatcggtccaatattcgagatccttatactgccaggaacggtcgcgcgggtgcgcccacagccccggcgactgatggccgacgcagttcatatcaaaagcgttaagacgaatttcacgttgcgatgacatagcgagctccacaattatctgccggccacggacggagccgggccggatggggggtcttagggtgttaaaaacgggaatggacgatcagtttgcagccggacatcgcgccagcaggtattgcgcgacgctttgggcgtgttccgccacctgcggcagccccatcagttcgccgaagcggccgcgcgccgccgggccggccaccagcaggcgcgggttggcaaggccgtcgccgccgatcgcctggctgtcggcattgacccacagccccaatcccagcggatcggcgcgcagcgccccctgctccgccagcgaactgagcaacgggctggcggcgatcaggccggcatgagccggccccgtagcgatcagcaaccgctgcgtctgcagcgcccgctctgcgccctggcgcggcagaatcgtcaagcgcacgccctgcggcatgggttccgcccgccgcagacgagcggccaatacctgcagcgtgcccgctgcctgttgctccatcagcagcgtgctcacctgcggcgcaagacgatagcggtgcacgtcccaataggcgcgcagatgccgcagaaagcgctgctgttcggtcggcgtcaatgcttgccacaggcgctggccctgggcgcgcaccgcgtccaacaccgcctgccacggcacccgttgccgagcggcgcgcgccacctcaaggcgcacctgccgcaccccgtcacgcagtccggatggcggggtaaacgaccacgtcgggtactccccttcggcattggcacgcggcagcaagccgtgacgagagagcgcggtaatcggcccgcgatgcccgcggcggtgcaacgccgctaccgcatcggccatcgtcagcccactgccgacgatcgccaacgattcatcgggctcaatctcatccagcgccccctccgcccagggattggcgatcaaacgcgcgtcgcgcgccagttccggggcgatctgccgcagcagcgcgggcggcggatggctggtcgccaacaccacataatcgccccacagccgttcgccgccggcggtgatgacggacgcgccctgcgcctgcggctgcaggtgctgcgcccgatcgcgcaggtgccgcaagcgggcctggcccgactgcgccgcctgatgaaaacgttcctcgacatagcggccgaaggcgccgcgctgcggataggctttaccgtcgcgccacaacgcctgcggatcggccgccagcccgccgccctcgcggaaccagcggtcaaaatcccccgccggttcatccgccagctgcatcctatcggccggaacgttgatgcggtgagtcggctcggtggtcgaatacgccacgccatagcccggcgcggcgcgcggttcgatcaccgtgacatccaccgctccgcgcgccagctggatcgccagtgccgcgccggtgaaaccgccgccgataacgataatatgggcacgcttcgccatcagccctcccgctgcgccgggccgggacgacgatcgccgccgatggtttcgccaaacgggccggtattgatcgtgcgagccgtctgatgagtcgactgcgccagcggcagcagcggcatcaccagctcggcgaagcggtgagcctcttccagatgcggatagccggaaaggatgaaattgtcgatgcccagcgcctgatactcgcgtatgcgcgccgccacctgctgcggattgcccaccaatgcggtgccggcgccgccgcgcaccaggccgacgccggcccacaggttggggccgatgcgcagactctcgcgcgagccgccgtgcagttcgctcatgcggcgctggccggtagagtccatgcgcgcaaagatctgctgcgccgccgcgatggtgtcgtcatccagatgcgcaatcagtcgctcggccgccgcccaggcttcgtcttcagtttcgcgcacaataacgtgcaggcgaatgccatagctgagtttacgcccctgccgctcggcgcgctggcgcaccaccgccagcttttccgccacctgagccagcggctcgccccaggtcaggtaggtgtcgatctgcccggcggcgatgtcgatcgcttccgacgatgagccgccgaaatagagcggcgggccgttttcctgcaccggcgggaacagcaattcggcgccttcgacgcgaatatgcttaccgctgaaatccaccttctccccttgcaacagccgttgatacaccgtgagaaattcctgtgtcacctcatagcgttcggcatggctgaggaagatgccatcccctttgttttccaccggatcgccgccggtcaccacgttgatcagcaggcgcccgtccgacagccgatccagcgtcgcggccatgcgcgccgccaggctcggcggctgcaggccggggcgcaccgccaccagatagcgcaaccggcgggtgatcggtgccagcgccgccgccaccagccaggaatcctcgcagcttttaccggttgggatcagcacgccgtaatagccgaggttgtcggcggccagcgccacctgctgcaaataaggcaggtccaccgggcgcccgccctgcgccgtgcccagatagcgaccgtcgccgtgggtcggcagaaaccagaaaacgttgatgcgatctttcactgactcagtcatttatgcctttcctatataactattttcattatttatcgatagaaaaactttgcttggttataaaaagaaaagcaggatgcgtgccacattgcagattaaaaaaaaccaatgcatatcaatatattgatgagatatcgacgtcaaaacgctgctgcattggcagcaggcggcggcggtaagctgttgccaatgcagcaccgtgcgccttttatcctctcgcggcgactcattggctgggataagatttttttccccatcgtcgtcagacaggagacgcccatgtacgatccccaaccgttcgccgccgacaaaccggtgctgatcgatccggcgtcgctcgctctgcaaagcgtgctcgatcggctggctcccaccgacgccaccgtgctgatcgtcggtgaaaccggcaccggcaaagaagtggtggcgcgctatctgcaccaccacagcgcgcgccgccatcaacctttcctggcggtcaactgcggcgcgctgacggaaagcctggcggaagccgaactgttcggccatgagaaaggcgccttcaccggcgccgtcggcactcatcagggctggttcgaagcggcggaaggcggcaccctgctgctggacgagatcggcgagctgaacctgtcgctgcaggtcaagctgctgcgcgtgctgcaggaacgggagatcacccgcgtcggttcgcgcaaaccgctgaagatcgatgtgcgggtcatcgccgccacccacgtcgatctggccggcgcgattcgccaacggcggttccgtgaagatctctattaccgcctgaacgtggcggcggtgactttaccgcccttgcgccagcggccggacgatattccggtgctggccagacattttcttgcgctgtacgcccgccgtctggaacggccactgccgcggttgacggcggaagcgcagcaggtgctgctggactacccctggcccggcaacgtgcgcgagctggagaacacgctgcataatgcggtcttgctgagccaggagggggcgatcgcaccgcagcaactgcagctcacccatcgcctgacggataacggcggcggcggcgacgacgccatcgatcgctttgtgcagcagcagttgcaaggcgacagcgcgcagctttaccaacgggtgctggatgcgctggtgcgcaacgccttcgaacgcagcggcggcaaccagctgcaagcggcgtcgttgctcggcgtcagccgcaataccctgcgcacccatttggcgcatcttggtctgatcaaaccgcgccgccgcagcgccggcgccccctcacattcaccggccatcagcgcagcgccgctgcccgaacgcgaactgcgcatcggctatcaaaagttcggcaacctcggggtgctcaaggcgcggcaaagcctggaacagctcttcgccacacagcgcatcagcgtgctgtggagcgagtttcccgccgggccgcagctgctgcacgcgctcgacggcgatgagatagacttcggcaccaccggcgaagtgccgccgatcttcgcccaggcacagggcaatgcgctagtgtacgtcggttttgagccgccggcgccgcagagcgtggcgatggtggtgccgcaagacagcccgatacgcagcgccgccgatctgcgcggcaaacgcatcgcgctcaacaaaggctccaacgtgcactatttactgctgcagatgctggacgaacagggattgacgttgaacgacgtgcgtatcgtctacgcgccgccgaagtatccgctgtcggcgaccgatctgcaggcggtggacgcctggatgatgtgggatccgctgctcagcgacgcgcaacgcaacggggaactgcgcgtgatcgccgacggcacccagcgggtgctcaatcagcaattctacctggcgcgccgcgacttcgccgagcgctcgggcgatctgttgcagccgctgatgcaagcattgcagcacaccggccgctacatcactgcgcagccgagagaagccgctcgtcacctttccaacgaactggggctggcgagcgcctcgctggaactcgcgctgtcgcgccgcagccacgagatccgcgccatggatttgcaggtgatccgccagcagcaaagcatcgccgaccgcttctacgccctcgggctgctgcccagagcgatcgccgtgcgcgaggcggtctggccgctgtgatcccctgccgaaagcgccgacgccagatgtccggcggatcccgggcggcagccgacaatgccgccgcctgaaagagggcagagatcagagataaggttcgcccagcgtcaacatcaaccggttggcccaggcgaaaaacgccgtcgcctgcaccaaatccaacagcgccagctcatccaggccctgagcgcgcaacgccgccagttgcccggcgtcagcctgcggcggcgtggcggatagcgcggcggcaaaggttatctgcgcttgccaggcgtcatcctgcccctggctcaacgcgccgcccggcgccaccgccagcaaccgatctatctcggcttcgcgcttcgacagctgcgccgccttgcgcgcatgcaccgaggcgcagtagatgcagccgttcaccttgctggcgaccgtcgccgccaactcgcgatcctgtcgcgacagcccgccggaggtataaaaaatcgcccggtcagccagcgtgcgttgttccagcaccggatggttgcgcgccaacaggcggaagtaatcggaatcggcgtggccaaaccgctctagcaacgcccggccggcgtcatcgaattccgccaacggcttggcggcgatccacggctcccaccccagttcttgccgggtaaacgccggcggcgcgtgacggccgcctcgcgtcgcgctctccgttcgccagcggccggccgttaccggctgatgcgccgcagcgtcgtccgtcttgccgcccaacaaccggtagccccgcagcaagcggctttggaaactgacaaaggcgattaactgcgacaatgtgacgatggcgtccagcgaccagccggcctgccgcagcgcctgcaagtgctgggcgttggcgttggccggttgaaacgccaaacgttctgcatgcgccaacgccgccggcagccgctcgtcttccggcgcgtcgccctgacgttccagcagagcagcgtaatgcgcggccaagcgcggctcgccatgccattcactgatgcgctgagccaaccgcagccgctgcgccagcgggaaatcgccggcgtccgcaggcgcaaacagcgccagatagctggactgaacggcatcggtcgccgcctgccgggtggctctggcctgcgccagcgtggaatccggcgcaatctcggccagttcggccagcagatcgacctggtgcggtaatgtcgtcatagcttttcctcaacgtgatattcataagcaacggcgggcgtgccgcgccgccagcccagttcaggggccacgtggcgggcgataagatcgatagaacgcagaatatgggcgtgcggcgggtcgatggagtgcacctgaaacgccagatcggtgacgcgcgccagcgcgctgtcccgttgcagcgaggctattacctgatctggcgtgcccaagtgcacgtcgaaagcgcggatcaggccgtcgagcgacgtatcggccaaccggtggccgctggcgcgcatccgctccagcccacggctcaacccggccgtggcgaagtcgcgtgcctgctggccgttctcgctgacaaacgcagtgcgcgaccccatgatgcgcggcgccacccctggcggcagcgccgccagataagcgtcaatgatcggattctgcagttcgtccagcggcaggtcaggcgcgtccgccgggcgcggctgcgtgcgcgacagcatcagaccgtcaccggcgcggccggcccgttcgcccccttccaccgagaacgtggcctgccagacgcgctgcgccagctgcggcgccgccgggtacagccggttgtcttcgccgcccaacgcctctccgcgccaggcgctcagcaacgtgcgcaaattctcggcgaatgccgtgttgcgctgcccggcgtcgagaccgaaagcggcgaaagaagacggcgtgccgcccccggccacgcccacctccagtctgccgtcggacaacagatccagtaccgcagtgtcttccgccacccgcagcgccgactccatcggcaacgtgatcaccccggtgcccagccggatacggcgggtgcgtgccgccgcctgcgccaaaaacaccagcggtgatggcagaccgccctcatcggcatgaaagtggtgctgcgccacccaggcggtgtcgaacccggctcgttcggcgtgcacgatctgttcggtcgccagccggtagcgctcctgcgcgctgccctgatccagcaatcgggtgaagaaaccgagtctttttccgctcatatcgcctcctcgaattttggctgtccggcatgcgatgcgcggccgggaatggcggcgatcaattggcgggtgtaatcgctccccggcatggcgaacaactcggcggtggcgccgccgtctacccgctcaccgcggtgcaataccgaaacgctgtgcgaaatccgccgcaccgtcgccagatcgtgagaaataaacaggtaggtcaggtcccgctcctgctgcaactcttgcaacaaatgcaggatctgcgcctgcaccgtgacgtcgagcgccgacgtggcctcatccaataccaatattcgcggttgcagcaccagcgcgcgggcaatcgccacccgctgacgctggccgccggacagttcgtgcggcctgcggttcagcaaatcgggcggcagcgcgacccgttcgaacagctcacgcacccgccgatcgcgctccggtttgccgatcggcgcgaaattcagcagcggttcttcaatcacccgataaagagtctgtttgggatcgagcgagccgaacggattctgataaaccagctgaatgcgctgccgaaactgacgcagcgcttcgcccctgagaccgataacattgacgccgtcgatcaggacctgcccggcatccggccgctcgaaacccagcaggcaacgcgccagcgtgcttttgcccgacccggactctcccaccaacgcatgggtggtgccgcgcggcacgctgaatgacacgcgatccagcgcgcggaacccctggccgccggacagccgaaaatccttaaccagcgcctgaaccacgatcgccggcggctgcccgctgcgtttcggcggcggcgcaacggcgccgctcaatgaaggcgcatcggctaacagtttacgggtgtatgcgctggcaggcgcgcgcagcacctcggcggtagccccctgttcctgcacccggccgtggcggaacaccagcagccgatcggcgcgttccgccgccacgcccaaatcgtgcgtcaccagcagcactgcagtgccgaattcgcgccgcagctcgtcgatcagatcgagaatgcgtttttgcaccgtcacgtccagcgcgctgctcggttcgtcggcaatgatcaacgccggctgcagcgcaatggcgatggcgatcaatacccgctgcttcatgccgccggaaagttgatgcggaaactggcgcgcccgcagttccgggtgcgtcagcccgacgcgggtcagcagttccgtcacccgctgttgtacctgcccgcgcggcaaccggcggtgaatattgacgatctccgccacctgctcgccgatggtttttaccgggttgagcgagctggcgggatcttgcgggatcaggctgatttgcgcccctctcaccgcatccagccgccgcgatgaccagccggcgatatcggtgccgtgcagccgaatggcgccctgttcaaggtggccgttgtcggccagcaagccgatgatcgcctgcgccgtggtggttttgccggaaccggattcgccaaccagcgccaccacttcccccggctcaatcgtgaacgacacctcatgcaccacccttcgcctgccttcgttgccctgataggcgatggaaaccttgtccagcgccagtaccggcggccgcgccgcccgttgccatgccgcttgcatgctcatcgcgcttttcctcccagcgaacggctgatgcggttagccgccaacaccaccgccaccaccaccatgcccgggaaggtggtcagccaccaggcggtggaaatgtagttgcgcccttcggcgatcagcagcccccattccggggttggcggcggagtgccgtaaccgaggaagctcagggtggcgatcgccaggatcgcactgccgaactgcagcgccgagaaggcgatcaccgaagtcagcgagttcggcaggatatgccgccacagcaccgcccaaaagctgccgccgctgccgtaagccgcttcaacgtaatcgctgtgccgcactcgcaccacttccgcccgtgccagacgggcaaagttggcaaccgaagtgacgcccacggcgatggcggcgttgaccgtaccgaaaccaagcaggatgataatgctcagcgacagcagcaggccggggatcgacagcagcacatcgacgacgcgcatcaccgcgtcgtccgccacgccgcccaacgcgccggcgatcaggccgagcgcggtgccgaacaccaaccccagcgccaccgccactaccgcgccggccagggtttgcgacgcgccgtacaccatgcgcgcatacagatcgcgtcccagttgatcggtgccaagccaatgagcaccgccgggcgccagtcgctgcgcgccggcaatgccttcggtgccgctgtaggcggtaaacagctgcggcgccaacgcccacagcaccaccagcgcaatgaccgcccaggccagcaaaagcgtcagggggacacggcggcggctcgaacgactggcgggcagcgcgccttcactttcagcgccggacagatcgcgctccggaaccgtggctttttcaaaggagatactgctcatagggatgctcctgcctgggttttcagccgcggatccagcagcgggaacagcagatccaccagcaagttgatgatgacgaaagcggcggccgagatcagcactatcgcctgcagcaccgccacgtcctgattgaccaccgcttgctgggtcaattgccccaggccgctgcggccaaacacggtttcggtgatcagcgccccggcgatcagttcgccgaacagcatgccggcgatggtcagcgccggcagcatggcgttgcgcgccacatgccgccacagcaccccgctgcggctggcgcccttggcccgcgccaccgcgacgaacggctgggtttgcaccgcatcgatgctgcggatcagaatttgcgccagcggcgcggagatcggcagcgccagcgtcgcgatcggcaaaatcaccccctgccactcgccggggttaatgatcgggatcagcttcaggcggaacgaaaagagctgaatcagcacaatgcccagccagaaggtgggcactgaaacgaacagcgacggcagcatctgcagcgccgaacgcagccagccgaagccggtcaggttggaaacaaaagcgataatcagcgccagcagcaacgccaccgcaaagcccagcaccgccaactgcagcgtggcgggcagattagccgccagcagcgcggtaaccggcaccccggcctgcattgagaagcccagatcgccatgcagcacgctgcccagggtatgcagatactgccgccacagggggacatccgcgccataggccgcgcgcatgtcggcgatctgcgccggactcagccccatgtccgggttctggaatttgatcaggatcgcatcgcccggcagcacctgcagcaggatgaacgacagggtaaaggccgcccacagcaccaatgccgcctgcccgatgcgccccgccagatatcgcttcattgcgcccccttaatgtttctctaaccaggcgccgtagaagctcgggcgaccgaccgcttcgaaactcacccccttcaaataaggcgcaccagcgaacacctgcggctcctcaaaaaacgagatcacgtaggcttggtcaatcaggtagttttgcgcctcgccggcgatctgcaggcgttgttgcgcatcaacctcggaggcaatgccgagcagcagggcattcagcttgtcatcgctaaagttgctgttgctgctggtgccgcccttctgcagcagcccgtcgcggttggttgggtaaaactgacttttaatcacgtccggatcggcgcgccccacctccaccaccgtcgccggggttttctgtgggtcgagattatccgccacccggctgccggcgtcgcccgccagaatgttcagccgcgcgccgactttcccccactgctgagaaaccagctgcaacaccgccttgttctgcggctgcggcaacgattcatacaccgtcagcaccagcttcttgccgtccttttcccgcagcccgtcgccgccctttttccaacccgcttcatccaacagccggttggcctgctgcgggtcaaatttcagcttgtcggacagatcgacaaagccggcggccgaggaggcgatcaccgatttggcctgcgggtagttggcggagaacagcgtatcgacgatctgcttgctgtcggtggcatgcagcagcgcttgacgcacgcgcagatcggccaccagcgggttatccggccggaaagcgatgctgtcgttgacgccgcgcgtcggtgcggcataaatgataaagccctgatcctgcgtttgcttctcgtcataggcctggatctggcggataaaatccgcctgcccggcctgcagcgcaccgatgcgcacgctgtcctcgccggtgacgatcaccttgatgccgtccagattggctcgcccttgttggggcgatttgaccggcccccagtcataatccttacgggcgctaagctcgacctcacgccccagcgtttcgccgctgaccacaaacggaccggaaccgatgatatggcgcgcatcgcccagttcgtcgtagctgcggttcagcgtgctgagcgataccaacccggagccgatagtggcggtgccctgcaggaaacccggcgacgatcgcgtgaaatggaatttaaccgtcagcggatccaccacttcactgcgctggtagttattgatcacctcggaaaccggcaggcgtttctccttgttgcccagcccgtaggtgtcgaagttcttcgccaccgcgttggcgtccagtggcgtgccgtcggagaaagtcacgccggggcgcagcttgaaagtgtattcggttttgtcggcgttgctgctccaggactcggcgatccagggttcaatctccagcgtcttggggttctggtaagtcagcttgtcggtgatctgattgagaataccgccgttggggtaaaacccgccggaaggcggataaagattggtgtgagcctgttgttcgaggtagatcagcgtgccgccctgcaccgccgccaacgccgggctcatcgccgccgcccctcctaacgccaccgctattccaccggttaataccttgaaagaaaaattaaacattagtgccgcacccatattatttctgaaagttatgggttagataacaaaccaaatcggcggggaattgaacgaactaatttcgctaaccaatggtgtaaatcgcacaagacgcgtctcttggcggcgaatgcaatctgttataaagtatcaaaacctcagccaaaggaagacgacgatgaaaatccagctgtcgctgctgtttctcagcctgttggccggcaaggctgcggcgtttcagtcaaaagtgcccgagccgcgcaccgaacaggcgcgtgcggcggaacagaacatcgaaaatctgttttacggctttcacgctatggatgcccagccggtgaatatcggccgctgtgaggcggtgccggtggcgggatgccaatgcgcattctgcacccagctgcggcaggccgggcgctgaaccgcccccttattcacccagctcatattgcacgttcaattgccctttcttcatctttaggccggtaatcgcgatcgcgcccacctcgcccagcgcggcgacatgggtgccgccacagccgtaggcgggcagctcgccgaagccgacctggcgcaggccgtccaccgcctgctggcggcgcggcagatcggcggcgatcaaacgcatcagctcctcctgcaaaaagtccgcttctatcgtctgcgcatccggtcccggcgcgaaagtgatgcgcccttcccccggccaatgatgcgccttgaccggccgccagccccgtgtttcgcccaaccagccgatcagatgcccagcggagtgccagcgggcgtgcagccgacgctgcgcttcatcgatttgcatcgtaaccggcccgttcggcagcggcgcggcggtaaagtgcaccacggtatccccctgctgctgcacccgcagcacggtaacaccgcctaacgcccccacatcggaaggttggccgccgccctgcgggtggaacagcgtggcgtccagttccacggcgtaagcgcccgcctcggccggcgcacagctcaacacccgcgcctggccctgtaaatcgtcgctgtagtaataacgtcgctcggtcatcattttttctcctcggttcggagagccattatattcatgccataatcggaggataatccgccgccatcacaatggacttttgcgtcatgagcacaaatctttcttacgcgctgttggccgaaatggccgttttcgttcaggtggtagagagcggcagcttttccgccgccgcccgcaagctgggcgcttcgccttccgccgtcagccgcagcgtggcgaagctcgaacaggcgctgacgctgcagctgctgcaccgcaccacccgcaaactgcggctgagcgaaagcggcgaagaggtgtttgcgcactgccgcaccctgctggcggcggccgacgcggtcatggcgatcggcgggcgcggcgccgcggagcccgaagggctggtcagcgtcagcgtacccaaagcggtgggccgcttcgtgctgcatccgcacatgccggagttcctgcgccgctacccgaaggtggacgtgaggctgcggctggaagatcgctacatggatttgatagacgatcgggtcgatctggcgctgcgcattaccgatcgcccctcgcccgggttgatcggccgccagttgatgagaatagaccatctgctgtgcgccacgccgcactacctggcgcagcacggcgcaccgcagcatccgcacgatctggcggcgcacagctgcatctatctgggggaaacgccgagcgacgcgcaatggaaattccgccgcagcggcaaaacggtgacggtcaacgtgcgcggccgctacgccgccaaccacaccggcgtgcggctggacgcggtgaaacagcatatcggcatcggcagcctgccgtactttaccgcccgccaggcgctcgaagacggcgagatcgtgcaagtgttgccggaatgggattttctcagcagctatcacggcggcctgtggttgctctacgcgcccaaccagtatctgccgcccaaactgcgggtgtttatcgactatctcgtcgcctgcctggcgcaggagccgcagctaaagcgccttgcgtagcgtgatgttgatgcggtgcggccccaccagcgagtggtagccttccttgaccggcaggatgccgtgaaaacagagccgagatgggccgccccacaccaccacatcgccgtgcgccagcggaatgcgccgcgcccggtcgccgcgctgcaggccaccgaactgaaacaccgccggcagcccgagcgacaccgagacgatcggcgcgccgaagtcgtgttcgtctttatcctgatgcagcgacagcttgctgcccggatcgtaacggttcatcaggcaggaatccggcacgaaggggccgaagcccgcctgctgcgcagcttcgtccgccagcgccatcaggatcggcggaatggccggccagcgtttgccgctgcgcgcgtcgcgttccgaatagcggtagccccggctgtcgctggtccagccgttgccgcaccagctcatcgccaccgacatcacgtgcccgccgggggtggtcaaatgccgccacggcacctgcgccaccacgccctgcaccgccgccagcagtgccggcccgtgatcgcgcacgaagccgtgcatcaccaccgcgccgggggcgatctcttcgcgccacggcggcggcagcgcgtcttcaaaaagatcgattgtcatcgccaaaacctgtatgaatacacagtatccattgtaacccgccgccgccgattgtccagcgcccggcggcgccattgttgttggcggcaaatttctctacagtagccgccataaaatcaatcactcaccaggaatgcgtgtgattaagggcatcactctttcagtcgtcgcctccatcttgttcggcgcgatgtattacttcacctctaccctcaccccgctgaacggcgagcaggtctacggctggcgcacgctgctgacgctgccgttcctgacgctgttcatggcgctgtccggcgattggcgcaaggtgggcgacacgctggcctggatcggccaacggccgccgcgtctgctgggcctgctgctcacctcggcgctgctgggggtgcagctgtggctgttcctgtgggcgccgctgcacggcaaggcgctcgacgtgtcgctcggctattttctgctgccgctgaccatggtgctggcggggcgcctgatctatcgcgatcggctgtcgctgctgcaaaaactggcggtggcatgcgccatggtgggggtgggcaatgagctgtatcaggcgggtggcgtgtcgtggccgacgctggtggtggcgctgggttatccgctatactttattttgcggcggcgtttcggcaccgacaatctcggcgggctgtggtgcgagctggcgctgatgctgccggctgcggcctggttcgccttcggcgacggtggcgccgcggcgttgcagagcaatgccgagctgtattggcgcattccgctgctcggcgtcatcagcgccgtggcattggtgtgctacatcctcgccagccgcctgctgccgttcagcctgttcggcctgctgagctatgtggaaccggtgctgctggtgatcgtcgcgctgctgctcggcgagagcatcagccaaagcgagtggccaacctatctggcgatctggctggcggtgctgctgctggcggcggaaggtgcgcaacacctgctgcgccgccagcgggtctgactcaggcggccagcgtggcgccgccgtcgatcacgatatcctgcatggtgatgtggctggccaagtcggaggccaggaacaacaccgcgttggcgatctcgtccgggcgggcgattttacccagcgggatccccagtttgaacagctcggggaagccggcgatggtgcgctgctgtgcatcgtcggtctgccacatgccgcgctgcatcggcgtgtcggtcgagcccggcgacaccagattgcagcgcacgccgaacggcgccatctccagccccacgcagtggttcaggctggtcagcgccgccttggaggcgcagtaggccgccatctgcgcgcgcggcacgtgcgcggcgttggagccgatgctgacgatcgcgccgctgcgctgcgccttgaagtgcggcagcacggcgcggaacaggtaaaacgcccccgaggcgttgacgttgatgcactggtgccagtcatccacgctcagatcttcagtattgcccatgcgcagaatgccggcggcattgaccaacacgtccagtcgcgggttttccgccagctgttggcggcacaccgcctccacctgctccggccggctgatgtccagcgtcacgcaagggtaaggcagatccgggttggcgaactcgcggtcaaaccccaccacctcggcgccctgcgtcaaaaaatgccgggcgatctgctcgccgatgccgcgcgccgcgccggtcacccacacgcgtttgccggtgaaatccatctgaatgctcatgcgcgcaccgccatccgggcgcacagccgggtcatgttgttgttcatcgttgtctcctgcgaaaaggataggatgcggcgtgctgcgccgcaaagtggccctacagcgcgccgctgttcaggccgaaagcgttgagcatggtgcccagtttggcggcggtttccatccactcggactgcggcgtcgaggcggcgacgatccccgcgccggcgaacagccgcacccggttgccgcgcagcaggccgctgcggatgacgatcgcccactcgccgtcgccgttggcgtcgcaccagccgacgatgccgctgaacaggccgcgatcgtgcggctccagatcggcgatcagctggcgggcgctctcggtcgggaagccgcacagcgccggcgtcggatgcagcaggcaggccagctgcatcacgttgagcgccggattcagcaactcgccgcgaatgcgggtggacaggtgccacatggtgccggtgctgagcagcgacgggccgctcggcacgctcaggctggcgcacagcggcgccaggcgccgacgaatgtcgtcgatcaccagtttgtgttcgtatttgtctttggtcgagcgcatcaggcgctcgctgccgaggcgatcctgccgcgcatcgtcctgacggcgcgccgaccccgccagcggattggtgtggatctcgccgccctgcttgcggatcagcagctccgggctggcgccgagcagcacgccgccatcggccagcggcagggagaagtggtatccggtcgggttctgcaccatcaggttattgaggatttggtggcccgccaccggctgctccagctcgatgtcgaggatgcgcgacagcaccgccttgtccagcttgccttgtttgaagcggctgaccgcttccgccaccgcgtgcttgaagcgcggctcgtccggaatgctggtgcaggcgaccaggcgatgcggctgttgcagcatcgggcgcgcggcgcgggtaaagctgtcgttggcgacaaactggcagttttcaggcacgtacaggctggaaggccggcgcgtatcgaacggaatggcgcccaccaccaccggtgccgcctggccggcggctttggcgcgcgccaacgcctggcggatatgctgcgccagcgcgctgtcttcctgctcgccgccgaacgccggcgtctcaatgcgctcgaacacgccgctggcggagagggaacggaattcggaccggtacaaaaaggtcgattgttcggcgtacgcaaacccggggaaggtttggttttctgtcgtcagtgtcgccacaagaccactcctttgttgcgcctcaccaatgataatgtttatgcgaatagttatcattagctgtaaagggatggtaaattacaccggttccccaccgtgggtcaatctccgatgaatgaatctttccgcccgctgcgtcaaatccgcgttacggcacggaaagaaataacacattgttattattgtattttagcaaaaaataaaggtcgtgacgtcgtcaccttcacgccaaaaatgcccgctgaaccggcgcccggcggcgcaatgcggcgtcaatgtcttaagcagctctaatacgaacgtctgccgctgcacatccacggccgtcatgcgcgcatcaagaaaatcgaagtaacaacgcacctgcggatacagcgccttaaacaggctctctttggcggaaaacgtcagcgtcagcagcgcgttgaacggcagcgtttcgcccagcaacgcctcgcgctccgccggtgaaacgatcgcgctccacagctcctcagctcgctccacggacagcaacgtctccacgtccagcccaacgccgcccagcccgctctcgcggtgcacggcgcacagcgcggtatgcgaattatggctcaacgccccggcaatgcccggcggccactgcggcgcgcggtcttcgccgcgcgccagggtgaagtcggcgaaaccgagtggcgccagcagctggcgcgccagaacacgtccggccagatactccgcacggcgtttcggcaccgcgcgcgccagatggtccggcaacgtaaaacctgcctcgggataactctcgtcgcggtaatccgccagcgcaaaatggcagcgcgccacctggcccggataaccgtccggcgtgaaaaagtcgatattgcggataaaagtggggatccggcaggaatcagagtcactgcccaaagaaagcttaatcaccgtcgtttaacttctcagcatcctggcgtaccgccaccagctgtgtaagcagttccggcaacgccgtttgcaccgtcgcccagaccacttcaaggttgatatcaaaataaccatgcgcaatgcgattacgcatgccgcgcatgtttcgccaagggatttcaggatggcgttgcgtaaacgcggggctgccatccatgattttcgtcacggcttcaccgatgataatcaggctcataatgaccgcctgctgagtgcgtttatcttcgataaaatctgccgacgtcaagccatcaacgaaatcgcaggcatcctgcgccgcctgttgcatgtgactcagataatcgaccaaccgcgcatctttcataccggctgggcctccgccaaaacctgctggcgaaaggccggcggcaaatcgagcggcgtcagcagatccacctgtatgcccagcagcgcttccagttccgactgcagcccccccagatcaaacaacgtggcgcccggcaacgcatcgaccaacagatccaaatcactgccctcccgatcggtgccatgcagcaccgagccgaaaatacgcggattggccgcagggaacagcccaaccgtttttcggatcgcctggcgatgttctgcaagaacaatggatggtcgcatggttttctctccccgttacacctaacgaaatgctaggtgatcggttgaggggattcaagcacaatcccccggcagccgcgcctatgcctctcccccgcattcgggagagaggctgggcattacaggatgcccttcatggtcttctcgaaatcgctccaggcgcagaaaccgtctttatcgatcgggcagcctttcagcgccagcgtcacgcgctgcggcggggtttgcagcgtcagcggcgtcgccttgcgcagctgttcggtggactgatagacgtactcgatcttcagcaattcacggctgttctgcgcgtcgcgccagcgttggaacaccagcttgccgccgatcggcgttttctcatactgctgcggcagctgatacggctggaactgcatggccgacagcagcgaggcgatattggagtcgtggccgaccagcaccgtcagcttcggcgcgtccggtttgcgctcgccgagcagcgcgttgttgatataagtcagcagcggtttggcgacgttttgcgccaccaccggcgaggtgaacagcgaatcctgatagccgtctttcagctgcgccagctgtttccactgatgcggggtagcgattttgccccaggccacctctttcatcgggaaaccttcgtagtactgcagcataaaggcgtccaccagcgagttgcccacccgcagcgggccggagacgcccggctctttgcccggcaccgcgctcatcacgctggcttctttggtcagatcgcagtgtttgtcggtcttgcaggcggcggaatccttgtaatcgatgatcttcgccagctgttgataagaggcatccagcttcagcgatcccagcgcggcgttcatcgccgccagcgcctgctggttgaaggcttcgccggtgtcggtgatgatcgggttgaaggtcggatccatctcgcccatcttgtcctgatggtgcacgctgacgtcgcagcccgggaacgcgccgttgctgaagaactgcgcggtggccaccgtgcgctgcaggctgttggcgtagacgtacacgctgccggcggtcgggcagccctcttgcggcaacaggccggtctgcttcagccaggcgttgaagtagtgccccatgtacacttccagcaccccgcccttggtggtcagctggccgcccggcgtttcccaggccggccaggccttcggcgtggactgcgccagcacgctgccgttgttggccagcggcgcgcgcaggttatggcggctcatcaccagcacctgttccagttgataaccgccggcttccgccagcgcgttcccggtgaataacaaaggcaggcacagcaataacgttttttttctcatccgcagaggctcccggaaaatgattatttttaaggtgttagcgtttgcctgagtatgatggcggggttagtgtgacaagtgtgtgacagggttcacgggaaaagatcgtaccagcggccaccgggcggcggccgctgtagttcaactcagtaccacaggctcatgatcggccagccgatcagcagcagcgcggcgatgtacaccacgccgagaatgccgcccaggcgccagtagtctttcgacttcacatagccgcagccgtagataatcacccccggcccggtggcgtacggcgtcagcacgcccatgatgccgatcgacagcaccagcagcatcgacagctgctccatcggcacgcccggcaaccctttgccgaccgccaggatcaccggcagcatggtggcggtgtgcgccgacaggctggcgaacaggtagtgggcgaagtagaacaccagcaccagcgccaccaccgtcatgttcggcgagaagccgtccagatgggtgctcatggtctgggcgaaccagtcgataaagccggagcgcgtcaggccgttggccatcaccaccagcgtcgccaggttaaccagcgtattccaggcgctggaatatttggtgatttctttccacgacaccacgtgcagcgccagcatcagcgacaccgccaacaggcacaccgcggtggcgtccagcaccttgccgccgaacacccacaggcacaggctgagcagcaccaggccgatcagggtgtattccttgcgcgtcagcttgcccatttcccccagcgcggtatccgcccaggcggccacttcgctgctgtgggtcacacccggcttgtacagatagtaggagatcagcggcgcgatgatcagcagcagcaggccgaccggcaggaacgccaggaaccactgcatccagctgatgtgcaccccggcgatcttgccgacgaactcgatgcccagcacgttcggcgcggcgccggtgacgaacatcgaggagctgatgctggtgccgaccaccatcatccacatcaggtagccgccaatgcggcgcgaggagggatcgttagggaaggaatcgaacagcggcggcaggtttttcaccaccgggaacacggtgccgccggtgcgcgcggtgttggacggcgtgaacggcgccagcaggatatcgatgatcaccaccgcatagcccagcgtcagcgtgcgcttgcccatgaatttcaccaggaacagcgcgatgcgccgccccagcccggtggcctcgtagcccagcgcaaaaataaaggcgccgaacaccagccagacggtggtgctggagaagcccgccagcccccatttcagcgcctctttaccggccttgaagcccggctccgccagttcctgcgcgccgaacaacacccagttggcgctgagcacgctgacggtcaccgcgataaagctgatggcggtggcggggatcggctccagaatcatgccgacgatcatcgccacaaagatggcgaaatagtgccacgcctgcggcggcatgccgtcgggcaccggtatcaataacaggatcgcgagcaccgccagcggcgctatcgctttccagatcttttcctgggtttgggacatagggactctcctgaaggcttggttattattcttgggcacccagctgcgccagcagccaggtcactatcaacaggtcggcgctgccgccggggctgaggttgcgggcgatgcagtcggcatcgaagcgccgcaggcgtgccaggcccgcctccccggccgaaccgccctgcgccagcagcaacgccgcccggcgccgcagccagcgcagtccgtgcaggccgccgcgcgaggcgacgttggtgtcaccgttgtgggccatcagccacagcagactgtccagcagcgcccgctgttcgtcgccgtcggcggccagccgttgccgatacagcggcagcgcgccgtcaagcaccagccggaaaccggcctccgcctcgccgcgcgcgccgctgaggccgtaggcagcgaacagccgctggccggcggtctgcccggcgttgttgcgccgcagctcgcggtccaccagcccccgacacatcgccgccgtttcggcgcacagcgccgctgcgccgatggcgcgcccctgctgctgcaggcggccaaaggcggcgcacagcaacccgagcgagaacacgctgcccttgtgggtgttaatgccgccggtggcgcgaaacatctggttttcgcaggccaggccgagcggccgcagccgcgccagctgctgttctgccggcaaagccgcgtcttcccgtccgcgttggataaagcgcggcagccacacgccgatggcgcgggcgctacggtaaaaatgcccgagatccatatcgcggtgggcgccggtgttatggcgatccaccagccccggcttgggcgtgaggttgacttccaccagcagcgcgcgaaaggcggcgcgggcgaagtcgcaggccggttcggcacggcgggcaggcagattaatcggcagagagcgcatcgttgaacatcctttccatttcatgcagcagctgctcgctgctatgccgccgctggcgggcgcagatcttggccggttggccacacagcaggcagcgccgttccggcaggccgatgtcgcggcgcgacaaaatgcgcccctgcgtatccagcacgtcgatgtcccacagccggccgatcgggcggctcacctccagctgcatggcgcagtccttcacccgctgggcgtcggcgcgcagcgccacaaacccttcgcagccggtggcgagcgccagcgcctcggcctgcgggctgggccagccctgttcggcgcacagccgcagcagcgccgcccagccgaggttgaagatgccgcgcgtcagcgcgctgtccttcaccgggccgggcaccaccagcgtcagcaccagcagcgtgcactggtgctgcgccagccacgcctgctggcgcgcctggcggcattcgcggctggtgagcagctccggcaggctgaccgcgcgttcggcggccagttgaggatcgacggcggccatcggttactccgccacctgatgcaccacgtcgatcaccgaaccgtcgcggtagcgcaccaccgccaccaccttgtcggtaaaagcgatcggctgcggttcaccggtcagctgcagcgcgcgggcgcgcagccagtcgatgctcaccacctcgagtccggcctcccgcaggcgctgcgccagctccggccgcgccgggttgacggcgatgccgtggtcggtcaccagaatgtcgatgctggagcccggcgtgacgcaggtagtcacctgctccaccagcgtcgggatgcgcccgcgcaccaacggcgcgacgatgatcgccagccgcgcggcggcggcggtgtcgcagtggccgccggacgcgccgcgcagcacgccgtcggagccggtcagcacgttaacgttgaagccggtgtcgatttccagcgcgctcagcaccaccacgtcgagccgatcgaccgaggcgcccttggagctgaagttggcgtactggttggcgctgatttcgatatggcgcgggttgcgcgccagcgaggtcgccgccgcccgatcgaagctctgcacgtccagcagcttgccgatcagccctttctcgtgcagatccaccatggtcgaggtgatgccgccgagggcgaacgcggcgcgaatgccgcgggcgcgcatcttgtcctccaggaaccgggtcaccgccagcgaggcaccgccggtgccggtttgcagcgaaaacccttcggtgaagtagcctgaaccggcgatcacctcggcggcgcggcgggcgatcagcagctcgcgcgggttcgaggtcatgcgcgtggcgtcggcgccgatcttgtcggcgtcgcccacccgctccagctgcacgatcagatccacccgatcctgcgccaggctggcgggatgatgcggatacggcaccagctgctcggtcagcagcaccacggtgcccgccgcctcggcgtccacccgcgcatagccgagcgagccgcagcaggcttcaccgctgtagccgttggcgttgccgaactcatcgcaggccggcacgccgaggaaggccacgtctatcttcagctcgccggattcgatcaggttgacccggccgccgtgcgaatgaatttgcaccggctccgccagcagcccgcgcgaaacggcgtccgccagcgggccgcgcagcccggaagtgtaaatgcggctcaccacgccgtggcggatatgctcaaccaacggcgcgtggcaatcggtcagcgaactggaggccagcgtcaggttgcggaaccccatcgccgccagcgtctccatcacctgattgagcgtcaaatcaccaccgcgaaacgcatggtggaaggaaatggtcatgccgtcctgcagcccgctgcggcgcaccgcttcctgcaaggagtcgcacagcttgagatcgcgcggtttgcgcgcctgcaggttggctttggacacgtcctgatagcccggcagatccgccgggttggcgaaggtcatcaatcgttgttggcggttcatcatgcttcctccccgtgctgcgccggttcttcccgtaagccggacagcgcggcgcgctccagcaccagccgggcgcgttcaatcaccgggctgtcgaccatttttccgttcagcgacaccacgccgcgcccctcccgctccgccgcttcggcggcgtccaccacccgctgcgcgtgcgtcacctctttggcggtcggcgcgtacaggttgtgcagcagctcaatctggcgcgggttgatcagcgatttgccgtcgaagccgagctgtttgatcagcgccgcctcctgcaggaaaccggcctcgttgttggcgtcggaatacacggtgtcgaacgcctgaatgccggcggcgcgcgccgcctgcagcagcgagcagcgggcgaacagcagctcaatgccctccggcgagcgttcggtgcgcaggttgcgcacatagtcttccgcccccagcgcgatgccgataagacgcggtgaagcgtgcgcgatcgccaccgcgttggtgatgccctgcgccgattcgatcgccgccagcagcccggtgctgccgaccggccggccgcaggccgcttcgatggcggcaatctcgcgctccatgtcgataacgtcctgcgcgctgtcggtcttcggcaggcgcacgatgtccgcgccgccgcgcaccaccgcctgcaggtccgccagaccgtaggcggagtcgagcgcattgacgcgcacgatggtttccacctcctggtatagcgggtgctgcagcgcgtggtacaccagccggcgcgccgcgtctttttcacgcaggatcaccgagtcttccaggtcgaacatcagcgcatcggcctgatagataaaggcgttgctgaccatcgccgcgttggcgccggggacgaacagcatgctgcggcgcagccgggttttattcagcgttttcatctttcgcctcccacggcagttggccaccctcgcaggcgcgcatcagcgcggtttccagccgggcgcgcagcacgcagtccagcgcccctttgtcgtcgacgatcacctgcaccggctccacctcataacgctgcagcacttccagcagggtgcgacggatcgccgcgccgaactgtttttccacgctgctggcgatcagcagatcgtgctgcggcccctcggcgggcgcgatgcgcaccatgacatcgctggattccagcgtgccggccattgcttctcggataattttcatcattcacctgattgtgcggactcaaaaggatgcggggccgccttggcccggcgctgcgtttgcagatcctgcaggtagtacagggtgtccggcggcaccagcggcgcggcagcgtggaagtcccccgccgccagcagcttgcgcacccaggaggcggagatcgccgtgccctgatattgcaaacgctcgatttccaccagcgcgatcggcgggctgggcagcgccggcgtttccagccagtagcgcatgtcgcggttgtatttcgcggtcaccgcgcagaacggctcgttgccgacgaagcggtgcgtaatgcccagcgcgggcgccagatactggcggaagatcttcagatcgatttcggtgtaacagtcgtcggccacgccctggtccttgatgaagtaacaggggaaggtggcgcgcgagatcacgtactgcgagccttcgtgtaccgtgaggttggggatgtcggcagtgccggccagcaccagccggcgccggtcttcatagctgaagcgcgaggtattttccttcaccagaaacaggtgcagccagtcgcagcgcttggccgcctgacgcaccagatactggtgcccgcgggtaaaggggttggcgttcatcacgatgctgccgatggtgtcgcccggccgacgttggctcgccagttgggcggcgtagcgtttcaggcggcacgggctgttttccatcagcaccacgatgcccggcacggtggcaatcgggtagaaaccgcactggcgaaacagcggctcgttctgcaccttggtgtagataaacagctgggtgtgatggcgctcataggccaggttcaccagctcggtcgccagcgccagcgccaagccttcgccgcgcatcagcgggctgatggcgacgcatttgataatattgtcggcgatgccgccgcaggcgaccaatttgtcgtgctgggtaacggtaataaatatttcaaccgtggtatcgatattcagatcgttactgcgcaagaaggcgcttatttctgaaatcgctttatgatccgatcgctttacccgattaaatacggcatcgcctaacataacacgctctctgggttaactggcaaacaacaaatgaaatacaaaaatgcattttaattaacatcagaaatggcaattaaaaccttaaaaaccataaagataaaatcaccctctcgttcaataaacccatggtaagcagaaaaaaaacgcggattattgacctatttcacaaaccgatcccggttaataagttatttaatgttctttatttgcttaattaatcttatggtgtttattattgagataatctttatttggcgccgcaattcacttacattcacttagcatttttattgcaattacgggtcgcactatggaatggctgaacatcctgatcgttgaagacgaaacgccgctggcggagatgcacgcggagtttatccgccagaacggcggctgccgccagatttggctggccggcacgctggcgcaggcgcgcgccatgaccgaacgcttcaagccggacctgatcctgctggacaactttctgcccgacggccagggcatcaccctgctgcgcgaactgacgctgagcgggtatcgcggcggcatcgtgttcatcaccgccgccagcgacatggctaccgtggccgaggcgttgcgctacggcgtgttcgactacctgatcaaaccgctggcctatgaccggctgagccagacgctgcagcgcttcagccagcgccgcgaagcgctgaaagacaaggcgcgccttaaccagcgccgcatcgacgagatgttcaacacctacgcccgcggcgaacagcaggcggcgctgcccgccggcatcgacgagctgacgctcggcaagattcgcgcgctgttcgccgagcccgccgcgcgccacaccgctgaaagcgttgcgcaaaaaatggggctcagccgcaccaccgcgcgccgttatctggagttttgcaccgccgcgcagcagctgcgcgccgagatcatttacggcaaggtgggccgcccacagcggatctaccgtgccggcgagccgcattagcggttatttgatcgcccttgcaaggttgcgtgtaaccgctttactttttatgcgccggtcagcatcttggtgagcatcacctagccgactggacgatcgccgatgcccgctgaacccctagcttccctgtccgagatcctcgcccgccgtgactggcaaaaccccgcctgcccccactaccgccggctggacgcccccccgccgttcgccagctggcgcacggtggaagacgcgcgcgacgatgcccccagcgccagccgccggtcgctgaacggcgagtggcgtttcagctatttcccgcgcccagaggcggcgccggagagctggctgcagcaagatctgccggacgccgccccgctggcggtgccgggcaactggcagctcgccggctacgacgcgccaatctacaccaacgtgcgctacccgttcccggtcgatccgccacgcgtgccggaagacaacccgaccggctgctactcgcgcgccttcagcgtcgatccggcctggctggccaccggccagacgcgcgtcatcttcgacggcgtcaactcggcgttctatttatggtgcaacggccactgggtcggctattcgcaggacagccgcctgccggcggagttcgatctcagcccgtggctgcagccgggtgaaaaccggctggcggtgatggtgctacgctggtgcgacggcagctatctcgaagatcaggacatgtggcgcatgagcggcatcttccgcgacgtcagcctgctgcacaaacccgccgcgcacctgagcgatgtgcgcatcaccaccccgctgcatgacggctttacccgcggcgaactggtggtgacggcgcgcgccagccggcccggcccgctgcaggtgcaggtgcagctgtggcgcgatggtgcacgggtggccgagcgcacccagccgctcggcggcgagatcgtggacgaacgcggcgcctatgacgatcgcgtcacgctgcgcctgccggtggaacgcccggtgctgtggagcgccgaaacgcccgcgctgtatcgcgccaccgtcgccctgctctcccccaagggggagattatcgaggtggaagcctatgacgtcggcttccgccaggtggaaatcagcggcgggctgttgaagcttaacgggcagccgctgctgatccgcggcgttaaccgccacgagcatcacccgcgccacggccaggtgatggacgaagcgacgatgcgccacgacatcctgctgatgaagcagcacaacttcaacgcggtgcgctgctcgcattatcccaaccacccgctgtggtatcggctgtgcgatcgctacgggctgtacgtggtggacgaagccaatatcgagacccacggcatgcagccgatgaaccggctggctgacgatccgctgtggctgccggcgatgagcgagcgcgtcacccgcatggtgcagcgcgatcgcaaccacccttgcatcattatctggtcgctgggcaacgagtccggccacggcgtgaaccacgacgcgctgtactgctgggtgaaaagccaggatccgacccgcccggtgcaatatgaaggcggcggcgccgacaccgccgccaccgacatcatctgcccgatgtacgcgcgagtggatcaggatcagccgttcccggcggtgcccaaatgggcgatcggcaagtggatcggcctgccggaggagccgcgcccgctgatcctgtgcgaatacgcccacgcgatgggcaacagtttcggcggctttgagcgctactggcgcgcgttccatgcacatccgcgcctgcagggcggctttgtctgggactgggtcgatcaggcgctgatcaagcgtgacgagcgcggcgaggaattttgggcctacggcggcgacttcggcgacacccccaacgatcgccagttctgcctgaacgggctggtgttcgcggatcgcaccccgcacccggcgctgttcgaagcgcagcgggcgcagcagctgttccgcttcgccttcgacgccgcctcgctgacgctgaccgtcaccagcgattacctgttccgccacaccgacaacgaacagctcaactggcggctggagctggacggcgtggagcgcgccagcggcagcctcgatctgacattgccgccacagggcagcgcccgctttaccctgctcgaccgcctgccgatgctgcatcagcccggcgagttgtggctgaacgtggaggtggtgcaaccgcaggccaccgactggtccgaagcgcaccaccgctgcgcctgggatcagtggcgggtgccacgcgcgctgcatcccgcgccgccgccggcgcagggcgtgccgcccacgctgattgaagacgatcaggggctgaccctcacccacggcgaccagcgttggcgcttcgagcgcagcagcggccacctgacgcagtggtggcagaatgagcagccgcagctgctgacgccgctgcgcgacggctttgcgcgcgcgccgatcgacaacgacatcggcgtcagcgaggcggaccatatcgatcccaacgcctgggtcgaacgctggaagctggtgggcctgtaccggctggaggagcactgcgtgcggctgcaggcggatgcgctgcaaaacggcgtgcgggtggtgagcgaacaccagttcggcgtggacgggcagattttgctgattagccgcaagcagtggctgttcgacgcgctgggcgcggtgagcgtgaatgtggaggtcgaggtggccgacgccctgccgccgccggcgcgcatcggcctgaactgccaactggcgacggtgcagccgcaggcggaatggctgggtctgggcccgcacgagaactaccctgatcgccgcctggccgcgcagcatgggcgctggcgcctgccgctggcggatctgcacacgccgtatattttccccggcgagaacggcctgcgctgcgacacccgcagcctgcgctacggcggctggcgcatcgacggccgcttccacttctcgctcagccgctacggcctgcaacagctgatggcctgcagccaccagcatctgctgcagccggaagcaggcacctggctgcacctggacggcttccacatgggggtgggcggcgacgactcctggagcccgagcgtgcaccgggattacctgctcaccgccggcgtttaccgctatcagctgcgcctgcagcgggcgatcgagggctaaatctgccaaaaaactcaacgggttgcgcattctgtaagcaaacagtcacagaatgtgtaatccgcctttgacatgctgacgacgcctcgctattattcgccccgttcacacgattcctctgtagttcagtcggtagaacggcggactgttaatccgtatgtcactggttcgagtccagtcagaggagccatatttagaaaagcccgctcagggaaacctgagcgggctttttgctgttgggcggctatgctcgagtatccccgacactctctacccgaaaccggtcagccatccgttgaacgggtaagtttctcccattgttcaatttcctgacctaacgcctcgagcttttgccgcaccaaacttaatgcgtcactgcctaacaacagatgcgtgggtgggttccggctctcaatcactgccagcatggcgtgagccgccttaatcggatcgccgagttgcttaccgcttttttcctgacgcgcctgacgaacaggttcaaataacgcgtcatagtccgggagacggcgagggctgcgcaccattgaacgcccggcccagtccgttcgaaacgagccgggcgctactgcggtcacgtagatgttgaacgggtcaagctctttacttaacgtttctgatatcccttccagtgcaaatttgctgccacagtaatagctgataccgggcaaggtaatgaagctgcccattgaggtaatattgataatgtggccgcgacggcgctggcgcatgcccggtagcacggctttgatcatcgccaccgcgccaaacacattgacgtcaaactggcggcgcagctctgcaagcggggactcttccagaatgccttcgtggccgtaaccggcattgttcaccagcacatctatcggaccgacggcggactcaatctctccaaccacctcatcaatacgctcaacgtccgtgacatcaagcagatagccaaaagcccgctgcgtatcgagcgcgccgaaagcctgcagtgcttcgctgttgcgcaccgtccctacaacccgatgccctacggcgagggcttcccgcgccagcgcctggccaaagccactgctgacgccggtgattaatatcgtttttgcagatgccataaaaagaactcccatgaaccatgaaggttgcatggtattctctgctctgccgcatttttaggccgtatcttctctttttcttgcctgattttatgaggtggtgggatgtccgacatgattgccctgatgaatagacttgcggtgcaagagggatacaacctcactgccctacctgatgtgcgaattttgcgttccgatcgcccgcttgccagaacgccggtgctttacgatccggggatcgtgattgtctgccagggcagcaaacgcggttatttcggtcaacaaacctatttatatgatgagcagcactacctggcggtttcggtgccggtgccgtttgtgatggaaaccgacgcgtcggcagcacatccgctgctggcgatttatatgcatctggattttcagcttgccgctgaactgatgttgcagattgaacagcatggcgccccgcatcctcccgtcgcaccgcaaagcatgatgtcgagcccgatggacgacagggtaaaaatggccgttcttcgcttacttgacgtcctgaccaacccgcttgaggcggcgatcctcggcccggcgcgggtgcgtgagctttattttcgcgtgctgacaggcgcacagggcaacgcaatgcgtgccgctctggccttgcagggccagtttggcaaaatcggtaaagcgttgcagcacatccatgccgcttacgcggagccgttaacgctgacgcagctggcgatgggggccggcatgagcgtgccgacctttcatagccatttcaaagcgataacgcagatgccgccgatgcagtatgtgaaatcggtacgcctgcaccaggcacggatgctgatggtgcgccaacaaatcaccgccgccgccgcgagttacgccgttggctatgaaagcccatcgcaatttaatcgagaattcaaacgtctgtttggcctaccaccggcagaggagataaaacgcatgcagcgtcacttcgccattccgcccgcgcagcctgcctcggtatttgtttcatcgcactgaggcttatgtggtcaggcgaacgatagtccgcttctggcgccaggcggatcggcacttggggagaaagtccgctatgagcgagagcggacatcaaagtattaaagcaaagaacaacatcttcaggtgataaataaatttgactgaaataacgtacttaccgacccgaaggccggtcattgttaacacggataacggttaccatgcgtaggcttcaggggcttccccacccggtcccggccagatggtatccagtcttttgagcgtatcgcctgaaagggacaacgtcagggcattgagattctgacggagctgttcagctgtgcgcggaccactgagcacagcggtaaccacggggttctgcaacagccaggccaacgccacgtctgagggcgcctcccccagctcatcacacagcgtttcccaggcctccagttgcggccgcaagcgattgatttgtgcctgcagctgcggtgttgcccggcggccatcggcaatttttttcagcacgccacccagcatccccatcccgaccgggctccaggggatcaggccaatgccgtaatggcgcagtgccggaatgacttcaagctcaaccgtgcgctgggtcaggttgtaaaggctctgttccgatgccagccccagcaggttgcgcgcatcagccgtgcactgtgcggtggcaatatcccagccggcaaagttactgctgcccacgtagctgattttaccctcacggatcagctgttccatggcctgccagatttcctcccagggggtgttccggtcgatatggtgcatctggtagagatcgatatggtccgttttcagtcttttcagactggcctcacaggcccggcgaatatggtaagcggacagatatttgtcattcgggcccgtatccatcggctggtaaactttcgtggccagcacgattcggtcacgcaggccactgcgcgccaaccagttaccgatgatttcttcggatgtcccgtacccctttgccatatccggtgactgcggtccgccatagacgtcagcggtatcgaaaaagttgatacccgcatccacggcttcatccatgatcctgaagctggccggctcatccgtcagctcaccgaaattcatggtaccgagaccgatgcggctcacccgcaggccggtacgacccagatgtttatagttcatgtcagatgctccttaactgaacgtgttattgcaggttcttacggaaaaagtctgtcagtttgtcaaaagggatcacgtcggtacgatcatagagatcgacatgccctgcgcccggtacgacataaagctctttaggctgaccggcgcgtttgaatgcatcctcgctgaactcttttgagtgagcccgatcgccggtgataaacagcatcggacgcggtgaaatggtttcaatatcgttgaacggatagaagttcataaacttgccgatactgctcaacatcggtttcgtcgtcagtgcttctttctcacccttcggggtgtaaccaccgcgttcggtgcggtagaaatcgaaaaactcacgctgaatatccggcgttgaagcgtccagtgtattcacggtaccgggaatgtaggccgtctcgcctccctgaaactctgctaaacgctgctctgtggctgaccggataaaggcctttcgttgttccggcgtctgggaatggttgaggccgttgcgaaatgcagcccccatgtcatacatgctgacggtggcaatggctttcatacgcgggtcaatcttggcagcactgataacaaaacttccgctgccgcagatacctaatacaccgatgctatccggatcaacaaacggctgtgtgcttagataatcaaccgccgcgctgaaatcatctgtgtagatttccggtgaaatcaggtgccccggtttgccctcgctttctccccagaaagagagatcgatagccagcgtgacaaacccctgctccgccagcttctgcgcataaagattcgaactctgttccttaacggctcccatcgggtgaccaacgacgatcgccgggtgtcgggtattctggttcatctttttcgggataaacaggttgccgaccacggccatctgatactggtttttaaaggtgactttttgctgcgtcaccttatcgcttttataaaaattatcggccccacgggacatatccgccgcagaggaagcaaatgcactgatcaacagccccagcgctaacgtaaattttttcatgatggtctccttatcattaagccagggtggcgttatccgaatggcagacgccgcagaacgcgaaatcaatctgcacatcacgggcgccggaggcgcgacgggtgatatccatcggctccagcggcagtgtgcccgcatgggcaccgtaagctttacctgtcatgacataactccagggtttatgaatggtctctggcagaagtgtctgcgcgtgaggtcaggaaaatcagcccggccgcgataagcagcatcgtgacgctggccaagaaagtgctctggtagccgtggtgatcgaaaagcagcccccctaccgttgaacctagcgcaatggataactggaccattgccaccatcagcccgccgccggcttcggcattctgcggaaagatacgcggtacccaggcccaccaccccaccggcgcaccggtagaaatcagcccccacaacccgagcagcaccatcacgatggccacctgactgccaaaagcgatcagtgccagcgcggtgatggccatcagcaccggaatggctatcagggtcgagtagaagccgcgtttcagcactctgccaatcagcgtggtgccgatgaaacccgcgacaccgataaccagcaggattagggtgaccactgaagcatccaccttcgtcaccgtttcaaggaaaggcctgatgtaggtaaagagcgtgaactgccccataaagaagatgccgacgcccagcatgcctaacgtgaccactcgacggcgaaacagcgtgaagacattgctggcaccgttactctgccgggtgacctgcatggagggcaggctgaacaactgccagataaacgcggcgatcgcgaccggcaccagacaaaagaaggccccgcgccagccgatcaccgaaccgagccaactgcccaaaggggccgcgatgaccgtggccagtgcattgccgctgttaaaaatggccaacgccagcggaactcggtgcaccggaaccaaacgcatcgccgtggctgccgacatcgaccagaacccgccgactacgatgccaatcagagccctgcccgccatataggtcaggtaattgggtgccatcgcaataacagcaccggaaattgccatcatgcaggtcaggccgagcagcagcgttttccggttaagcgtgcctgccagcacggaaataaacaggctggttaccactgcaaatgccccggaaatggcgatgccctgtccggccatgccttcggtgacacgaagggtctgcgccatcggtgtcagcaggctgaccggcatgaattcggaggcgatcagggcgaagacgcacagcgtcatggcaaagacaccactccagtgcgcaggctgtttcccgcttccggtgtttttttttctgttttcgtctgtcttattactcattcagggatttcttttcagtagataacatgaagtctgtgccccggagccttcagcgctgcaggaagagctgaaacggcatacggagacgggataagggggataatcgcggtacggaaggtgctgcgggtcagttggcgaccctgatctgcaccgcaagaggtccgtggcgctgcaggaccggcagtccggaatccactttccctaacgggatcagtgaacgggcgtaagccctgccctgggcaaaaatcgccaggttgccccagggcgcgtagtaagtgatatctccggcttccggcgtcatgccgtccggtgcctgcaccgtggaaagcctgcgcggcaggtcgcttatacgctcaatatcgtcatagtcttccagcgtcaggctgaggggaagcaaagacgcaaagtcccggcctgtcggcgtatcaaagagggtggcggtggcggtttctccctccacaatgatctcaattttcataagcgtctcctgcgccactccccggtcgttgtcacccgccatagcggactgcgtgacgaaaagcaggccggcaaggagcagcagtgatgttctgcagtaagcgttttgcataagggttagcgttgactttttcatcgcattattgttaccaatatgcagcgggttaactagctaatgaatacttaatacccttataagtaaaatttataaatggaccggaaacgagcatggccagacgcaatctcaacgacttactctctttcgtcaccgtggcgcgtgagggcagctttacgcgcgctgccgcccagctcggcgtgacccagcccgcactgagccaggcgatttccgggctggaagaacggatgcaaatccgcctgctgacgcgaaccacgcgcagcgtgtcagtgaccgccgccggggaacgcctgctgcagtctgtgggccatcgtattgatgagattgaagccgagctggacatgctgacggcactgcgtgataaacctgcggggaccgtccgtattacatgtggacctaatgttctgaagaccacgctgctgccaaagctgacaccactgttacgcgaatatcctgatattcatattgagtttgatgccaaccacgggttccgggatatcgtggcggaccgttttgatgccggcgtgcggctcggagacactatcgacaaagatatgatagccgtacccattggcccgaaactgcgcatggcggctgtagcttcccctgagtattttgcccggtgcgccgcccctcagacgccacgcgatctgatgcaacactgctgtattaatgagcgcatggttcaatcggggaaaatttacgcctgggagtttgagcaggaaaacggtaaatttcacgttcgggttgaagggcaaatgacgtttaacacatcggaacacgtcgttgacgcagctcttgccggactgggcattgcctttttacctgaagaggagttcggcacacatctgcaggaaggaaaactgatccgcgtgcttgaagaatggtgccgtccttttcccggctactatctttattatcccagccgtaaacagccttccccagcgttttcactcgttgtggatgcgttgcgtattaaccggaaaatttaacgctgaattatcgggccaatatttcaagaacggacgtgaacgtccgcttctggcacgcaacggacaggctacgtggtcattgggtctgctttgagcgaggagcggactttagtagaaaaatagaaggcagtatgtagactatcttcttttagtgtttatttgttatggccttatttatgtcttctgaaatgattttcccactcaaagaaactgagcggcgcgcggtaagagttgtcctgattgataagacctgctcgatcctgcttctcagcacacgtgatgtcagtaatcctaacttcataaattcgtgggaattacctggcggtggcattttggagggggaatctcacgcggacgcagccatacgtgaagtgtttgaagaaacgggtttgatagttcctttccaaagcgtccgtgtacctcagtggttcagagatgttcattactcgtatcgcggtgaaaggcgcctgcaacacgaagctatatcccttgcctatataaatgatttcaaacctgatatccattatgcagaacgggaaccttttgaactggaagatcatctcgagtatcactggtggtccctggaggaactaaaatcgtcgtctgcgactttttatccaaggaacttacctaaacacattgagcaactgctccagggggaaagtattaatgatcccattgagatttgggattaactggctgatctgtaatcataattgaagtactttctgccaacattcccgatgtaagcaaaagagttttcaggtttgtcggctaacctgttcaagattgttaacgtccgctactggcacaaaaccgaccgccagagtccccactccagcattccccccccattccacactccagcagcgccagagagaaatcgccctcctgcgttgccgtcggtgtgaacccgcaaagcggcagccaccgccataacgccgacgcttggccccaccagcgaaacccactcttttatctaagaagattcctaacccagctgacggaaatccctccctggcaccaatacgcgggttaacccgccgatttacagcaataatcctgtaaaaacaatcgataagcgaattgttcgcgctcggtaagttacgtctatcctttcgctatgggcgcctgccgcccatcgttcgctgcagatcgcggcatgcgcgtttctggctgttcgggtttcggtttattccatcgcgcgcttccattcatcatgttgaatttcaaagcaatctctcagcaacaaggagtgtttatatggcttacgtcattaccgaccgagaaaaactgcaagcgatttgggaggccgccaaagccggcgactggccggccgtgtatgccgcatccgtcgatgcgctcaccgatcccaaccatgccaaccaacccattgagggcgtggatatcgcggtgtatacctggatcaaaggcgcctatggcgtgaactcgaatcagggggcgtttgcccattacattcgcgaccaaaccaagttgcagtatgagctgcgcaccgggcatgtgcccgatgactgggaggcgcgcattcagaatgcctccgacaacatcgccaaaaacttcgccaaaacgctgtttggcgtcgatctgagcagcgatcccaatgcgccgctgccggatgccccgcccaccagcgccaaagtgccggatattcacgaggttggcctgatcgacgccggcgcggcggcgtccgaagtgttcaccgacgcctcctcgaccggcgcccccaactattccccctgggccggcaccacgctgttctcttatttaggcgatacctcgttctttaccgaatgggtggcgaccaacgacacctcggcctttaaggtggaaggcgggacttacgatctgattgcggcggcgcaggtctccatgcagatgaaaaacctcagttacgtggttgaaacgctgctggcgggcgaagtgcccacctatttgaccaccctcggcattggccacgagaccatccgcctggccgccgaggcggcgcgtgatttctacaccgaatcctacggcagcagcgtgaccggcggcggcagcattatccccggcaagctggacatcggctcggcgattttcaacgacattgccgacgtgctgtccacgccgaatctgtaccgcgtcggtacgctgcatgatgatgatttcacgctggcgttcggcaatatcgccgttaacaccggcagcggcgacgacaccatcagcgtgccgcgcggctggcaaaacaacgccggcaactacggctggacggtgatcgacggcggcagcggccacgatacggtcgattattccagcctgtcgcacggggtaaacctgaagtttgacgcccagggcagctatggcgggcgcggggtaatcgagaaaaacggcatcgggctgtatggctttaaggacgggctgtacaacatcgaagcggtgaaactgaccgactttaaggacaacgtcacctttaacgatcgggtgctaacgccggccaacggtctggaggtcaacctgggcaaaggctccagcgagattcgcttcgagcatggttataccactgcgccgggtgggagtgcgccacaggattatctcggcgtaaacctgagcatgctgtccaacgatgtgcccttccccaacagcctgctgaacattcccgtgaagcagacccacaatatctacatcgacgacagcttcgagctgggctttttacaggcctcctccctgtctatcgataaccacctgctggccttcggcgccgaaggatcaaacagcagcttctcactgaactacaacgcgcaaacccatacgcaggatctatcgatattcatgcagggcgaaagcgcgctcaatcagcacgtcgtcaatatctacaattgggatcaaggatactttggcatcaatctggagcagccggccattcagcttgtcggtttgcaaaccattgccccgcaagagctggcggccgcctaagcgaagcccgccgggtttaccggcgggctgtttacctgcggcgcggctcactccctgtcacgctccgcaatccgcgccatcaacgcccccagcaacgccagatcgaccagcagcgccagcgcgaaacagctccctctcacgcccggcgcggcataggtttgcaccagcgaaacggcaaccactacggccacgagagtcaccaccgtcgtcaaacggtacgccacggcgagtgcgcctttctcccccactgccgtgcggtaggcgacgccctgccccagaccgccgagggcgaggcccggcagcagggccggccagccgtggccgccgaacagcatcagcagcatcaatagccatcccgccgccgccagcaaaaagccgtggcggagaatcgccagcgcaggccggttccgcagcgtccgccagcgggccagcgcggcgccgccgagaaacgccagcgccaatgccgtcagcagcatcagggtagcgccgatgcccagcagattttcggtcttcagcagcaaggcgcccgctgcgaccggcacgctgagcgccagggcgctcgccgccgttcccgtgtgttccatggcgcccagggcgccgttgttgatatagaggctcatcgttcactccgacatgatggaaatgatgaaataaattcatttccctgttcacatgtcagtagcctatctcttgtataatcggtaagacaaactcatagttttcagccttggatgagaataattcagccatgagaaaaacccgtttgccgccgctgggcgcgctgcgcgctttccacgccgtggccgtctgccgcagcttcaaactggccgccgaggcgctgggcgtcagcgcaacggcgatcagccatcagatcaagctgctggagtcggtgctggcatgccgggtgtgcgagcgcagcgcgcagggcgtcagcctgaccgaaaccggcgagatcctgtatgccggcacccagcgcgccttcgccgcgctggagcagtccgtcgcccaaatcacccgcgcccggcagccgccggcgctgaccgtcaccaccacctccaactttctcacccactggctggtgccgcgcctggcggatttcaaggcggagtttcccgccatcgatctgcgcctgcacaccagcgtcgagcgggtggatctcagccagcgcaccgtggacgtcgccatccgctaccgtgaaacgccggaaagcgatctgcactgcaccctgctgcatgaggatcgctttatcgtggtggccagcccggcgctggcgctggagcacatcgaagatttgctgcgggtgacgctgtttcacgtggagcatcggcaggtgcccgccgactcaccgacctgggagaactggcggcggcgctacgggccggaaggattgaacgtggaagccgggctgaccttcagcgacgagacccatgcgctgcaggcggcggtggcgggccagggggtggtgatcgccagccggctgctggcgcgcgatttgttgcagcgtggcgttctggcggcgccgttcgagatgtcattgcccggcgccaactactatctggtggccaccgaagagaccgcgcagcgccccgatatcatggcgctgcgcgcgtggctgctgcggcaaatggcggcgggctaacggctatcgggggcgatttcgcccaggcggatcgccacgctgatcgcctgcgcggtggtggcggcgccgagacgttggcgaatgcgccgcaggtggttttccaccgtgcgttcagacaggccgagcatcgcggcgatatccgcctgccgccggccaatggcggtccagctcagcacctcgcgctcgcgcgccgacagccggccctcccgttcaccggcagcaggttcgaacagccgccgcgccgccagaaaagccgccgcgcccaccagcgacagcgccagccgcaccggcggcgaggcgtcgatgcgctcgccccccaggctgaccgccccctccaacccggcggggccgaataccgggatctgtacgccgtgcagaccggcgccgcgcggcgtgcgcacaatccggtagcgctcgccctgctgcgcccgggttttggtccagaagaacggttctgcggcccgcagcatgtgccgggtcaccgggcagtgccgcacgtaggtcagcgcgtcgaccgcctccccctcaccgaaccagtcgccctcgacccagtagatatgctcgatccccgcctccgccgccgcggaggcggaaaacagcacaaagcggttgaaaccgaacggcgcggcgaagacgcgaacccgcccctgaatggcggacaaggtgcgctcgtggtccatcgccaacgccgtctggaaagcgcgctgcgcgatctcgtcgctcatcgcgcggcgacgtcggccagcagcgtttctgccgccagtttgccgaggttgttggaagccagcgggctgtcgccggtcagcaggcgccgatctttatgcaccttgccggtgatgtcggcgttgacgatcttaacgcccaactcgcgcaggcgttcgcctaccagccagggcatcgggccggggatatagccgatatcgatgttggcgccggtatcgagcgagtccgggaacacgcacatctcatagccgcgatagaggaaatccgctttgctctcgccgatgcccgccgccagcaaaccggccggcccgtggcacagcgaaatcacgtagcgatcgtggtcatgcgcccagtgcagcgtctttttcacctcttcactgaacgggatatcgttgagcacgccgtggccgccgggaatgaaaacgccgaggtagttgccgccatccagatccttcaccacttccgtcagctttttcggctgcttgagttggctgcggtacttctcgtaggtggccttgaccgcttcatcttcatgcgggaacgcccacatctccagcttcaccggatcgccggacggcgtagcgacgtcgatctcgaaaccggccagatccaggtgatacatcggcagcagcatctcgaccgggtgattgccggtggagaagaacttgccgttttgcatcagcaggtagcgctcctgcgaggcgatcatcagcaccttccacttgccgccgcgataggcgttcgggtaactggcgcccgtgaagtcggttttggacgaggtgtactggctgagggagtaaggggatgggaagaacgcgttgtcttccgccacatccggggtgggattacgatcgttggacactgaatcagtcatgattatctccatattcatcgttgcattgcccattcagcttaaataaccgccggcagggccgcaatgagggatatccctcaagcagcgcccaggcggcggagcgtccccctgggcgctgttcttagctgttcacaaacgccagcagatcggcgttgacctgatcggcgtgggtggtcgggatgccgtgcggcgcgcccttataggtatgcagcgtgccgttttgcaccagcttggccgacagcacgccggaatcctgataaggcaccacctgatcgtcgtcgccgtggatcaccagcaccggaatggagatcttcttgagatcttcggtgaaatcggtctgcgagaaggcgacgatgccgtcatagtgcgccttggcgccgcccatcatgccctggcgccaccagttccagataatggcctccgacggtttggcgcccggacggttatagccgtagaacggaccggccggcacgtcgtaatagaattgcgcccggttggcggccagctgcgcctggaaatcatcgaacaccgctttgggggtgccctgcggattggcgtcggttttcaccatcagcggcggcaccgcgctgatcagcaccgctttggacaccttgtcctcgccgtggcgcacgatatagcgcactacctcgccgccgcccgtcgagtggcccacgtgcatcgcgccctgtacgcccaggtgtttcaccaccgcggcgacatcatcggcgtagtggtccatgtcgtgcccttcccacacctggctggagcggccgtggccgcggcgatcgtgcgcaaccacgcggaacccttggttcacgaagaacagcatctgggcatcccagtcatcgctggacagcggccagccgtggtggaagtagataaccttgccgtttttggggccccaatccttgtagaaaatctcgacgccatcgctggtcgttacataacccatgtcgtttctcccatttacactatggttaaaaaagaaggtttatactgcgcgcggcgccgggatctctggctccctcatcccggctggccgacgatcttgcgttgatcgtttaacgagtataggtttaaagctcactttaaggtcaaacccaattcggcaaaccgcattcccgctttcgatcggcatcaggagtattcaagtgcaaggagatgacaccgccacgacgatggagcaacggcttgccgcccagcgccacgccttcctgcgcgacggcgcgccgacgatggatcagcgcaaggccgtcctgcgccgcctgcggagcgccattctggcccagcgcggcgcgctggcggcggccgtcagcgcggacttcggccaccgctcgccttacgagaccgacattttggagattctggtcaccgtgcaggcgatcgattacctgctgcgcaacctgaaacgcttcatgaaaccggagcgccgccacgttgccctgccgtaccaggctgcgcgcgcctatgtgcaatatcagcccaagggcgtgatcggcgtcatggcgccgtggaactaccctttatcgttgaccttcatcccgctggccaccgccctggccgccggcaaccgcgtgatgctgaaaccttcggagctcacgccgcataccagccagctcatcgagacgatgctggcggcgcagtttcccgccgacgagatcgccgtggtgaccggcgggccggagatcggagccagattcagcgagctggcgttcgaccatctggtgttcaccggcagtacggcgatcggccgtcaggtcatgcaggcggccgctaaaaatctggtgccgctgacgctcgagttgggcggcaaaagccctgccgtcgtggcgcccggcgcgctcaccgccagaatcgttaacagcctggcgttcggcaagctgtcgaacgcgggccaaacctgcatcgcgcccgattacctgctgatccatcagaacgatgtggagagcttcattgcgctctacgacgcggcggtcaaagcgttttaccccacagggccgacgggcagcgactacggcgccatcatcagcgacaggcactatcaacgtttgcaagacctgctggccgatgcccaggcgcggggcgcgcaaatcattccggtcggccatcgcccggactcggcgtctgaacggccgaaaaccctggctcccacgctgatcgtcggcgcccccgacgacagccggatcatgcaagaagagatcttcgggccgctgctgccggtgcgcacctacgccgcctttgatgaaacgatcgacgttatcaacgccgggccgcgcccgctggcgctgtattactttggcccggcaggcgcgcagcaggatcggctgctgacgcacaccacctcaggcaacgtcagcgtcaacgccaccctgctgcatttcgcccaggacgatctgccgttcggcggcatcggccccagcggcatgggggcctgtcacggcatcgaaggatttcgggcgctgagccacgccaagggcgttttcatccagagccgctggcactttaccggcctgctgcgcacgccgttcggcaaactggcggacgcggtgctcacgttcatgttgcggcgccgataaagcggtgtgctgacaatcaatagcacagccatgaatcgccgcaagctatcacaatattcactcattcctattttatctctccgccgccgctgactaagcttagccatgagtcaccctttgtccgttggcgacgggggtgacgtaaatcgattgagttcagttatttagcgcaacacccgacgcaagccttacccgcatgccttgttaaccgctccacgcccggcggctggagcatctttacggaagcagagagcgcattatgacaactgaaagcaaatgcccgttttcgggcggcaagcagcccgcaccgcagaacggccccaccaatcaggattggtggcctaatcagctcagcctgaaaccgctgcatcagcactcccccctgtccgatccgatggataaagacttcaactacgccgatgccttcaacagcctcgatctggcggcggtcaaacaggatctgcacgccctgatgaccgattcgcaggaatggtggccggcggacttcggccactacggcggcctgttcatccgcatggcctggcacagcgccggcacttaccgcatcggcgacggccgcggcggcgcgggcgaaggccaacagcgcttcgccccgctcaacagctggccggacaacgtcagtctcgacaaggcgcgccgcctgctgtggccaatcaagcagaaatacggccgcaacatctcctgggccgatctgattatcctgaccggcaacgtggcgctggaatcgatgggcttcaaaaccttcggctacgccggcggccgcgccgacacctgggagccggacgacgtctactgggggtctgagaagatctggctggaactgagcggcgggccgaacagccgctactcgggcgaccgcgatctggaaaacccgctggcggcggtgcagatgggcctgatctacgtcaacccggaaggcccggacggcaaccccgatccggtggccgccgcgcgcgacatccgtgaaaccttcgcccgcatggcgatgaacgacgaagaaaccgtggcgctgatcgccggcggccacaccttcggcaagacccacggcgccggcccggcgtctcacgtcggcgccgatccggaagcggccggactggagtcgcagggcctcggctggcacagcaccttcggcaccggcgtcggcaaagacgccatcaccagcggcctggaagtgacctggaccaccaccccgacccagtggaaccatgacttcttccgccacctgttcgaatacgaatgggagctgagccaaagcccggccggcgcgcaccagtgggtggcgaaagacatcggcgaaaccattcccgacgccttcgacccgaacaagaagcgccgcccgaccatgctgaccaccgacctgtcgctgcgcttcgatccggcctacgagaagatttcgcgccgcttctatgaacacccggaagagctggccgacgccttcgcccgcgcctggttcaagctgacccaccgcgatatggggccgcgcgcgcgctacctcggcccggaagtgccgcaggaagagctgatttggcaggatccgatcccggcggtcgatcatccgctgatcgacgagcaggacgtcgccgcgctgaaaagcaaggtgctggcttccggcctgccggtgtccgcgctggtttccaccgcctgggcttccgcatcgagcttccgcggttccgataaacgcggcggcgccaacggcgcgcgcattcgcctggcgccgcagaaggactgggccgtcaaccaacctgcgcagctcgccgcgacgttggccaagctggagagcatccaacgcgccttcaacgacgcgcagaccggcggcaagcgcgtctcgctggcggatctgatcgtgctggccggcgcggcgggcgtggaacaggcggcgaagaacgccggcttgaccctgacggtgccgttcgccccaggccgcatggacgcctcgcaggaacagaccgacgtggactccttcgaggcgatggagccgctcgccgacggtttccgcaacttcctgaagggcaaataccgcgtgccggccgaaacgctgctggtcgacaaggcgcagctgttgaccctgaccgcgccggaaatgacggtgctggttggcgggctgcgggtgctcggcgccaacgtcggcggcacgcagcacggcgtgttcacccatcgcccgcaggcgctgaccaacgacttcttcgtcaacctgctcgacatgggcaccacctggcacccggtgggtgaggacggcctgttcgaaggccgcgatcgccgcagcggcgcggtcaaatggaccggcacccgcgtcgatctggtgttcggttcgcacgcgcagctgcgcgcgctggccgaagtctacggcagcgccgacgggcaagagaagttcgcccatgacttcgtcgccgcctggaacaaagtgatgaacctcgatcgcttcgatctggcgtaaactccccgcaacggtctgcttcggcaggccgtttttcctcccgagaaccacaccgcctccgctcagcgccagccgtagcgcacgtcgttatatttcttttcccgcttattcgtatttactcaacaagtcatataaaaatttgatgggcggcaattcttttaatgctgtatttatatttagagggcaatgaagaacgtaaattcagcgcgctaatacgatatatcccatcaaggagaacaccgttatggattatccccaattcacttcaacacgcggcgaggcggaccgcattatcagcgccgacccttagcgatagcgggcctgctggcccggtgcctcaccgtttacgccaataagaataaatgttctgcccctgcgccatattcgccggggcgtcagaacttcgcccttatttagcgtttcatcacgcgcgttgcgtttttagcttttatttttcagccgacgggaaagctcataggaaattacgctgcactcaggaaaataaccgctacctggaggtcatcatgcaacacattatcggtatttcttctcgtcggctgaggatatcggcccttgcgctgctgctccctgccgtatcatgggcggccgatacggcatctctcgccgtggggccgcaatatgacaccacccatgtctacgtcgaacgcggcaagatggatgcctttgtcgacagcatcctgaaaaccttcggtggcacccgcaccgaacgcgtgctggtcaacgtcacgccgacgccgagcgaaacctattcccagctgatactgacgccggccggcagcttctcggtgttcgatttcaaaacgccgatcccgtacccgttcggcgtcgaacgcaacggttttctggtcagggatatggacgccgctatccggcaggccagggccgccggcgccgatgtgctggtcgcccccttcgacgatccgattgggcgcgacgcggtgatccaatggcccggcggcgtcaacatgcagctttattggcacaccaaggcgcccaactacaagccgctgctgagcgtgccggaaaaccgcctgtatctctccgcttaccgcgtcgatgatttcctgaaaagctatcagacgttctcgcacggcaaagtcgtgcgcgacgagcaggtcagcgatgcggcgatcggccgcaacgataacggcaagatccgccagatcgaactggactcgcgttttggcaaaacgcgcattttcgtcaccgatgggcatctgccttatccgttcggccatgagcgcaccggctatggcgtcgaggatctgcaggccacgctggccaaagcgacagccagcggcgcgcaggtgctgtggcgttcgacggcggcggaacgccgcgcctcggcgctggtgcgtttccccggcggctacatcgccgaaattcaccagacagccaaataaacccaaggcgcgctgcggcgcgcttttttcttcggatattcatgatgaaacgcacgctacccgcactgttgctgttctccacgctccccgctctggcggcggagcccgccgcctccccctggaaaaacatcccgttgggtgatgcggccaccttatctttcgacggttcactgcgcgagcgctatgaatggacggatcaacgggatttgaatggcggacgcgacgacactttcatgcagcgcttgctggttggcgcgcgcctcgactacggcgactatttcggcgcctatgtgcaagtgggatcgtcgctggccgcgccgcgcgatcgcgggcgcaagccgaccgacgaagatcatgcctacctcgggcagggctatgtggatatgaaactgcccactgcctatggcctcggcaccctgcgggtcgg
